(19) United States
(12) Patent Application Publication
(10) Pub. No.: US 2025/0320490 A1
(43) Pub. Date: Oct. 16, 2025

(54) COMPOSITIONS AND METHODS OF NUCLEIC ACID-TARGETING NUCLEIC ACIDS

(71) Applicant: Caribou Biosciences, Inc., Berkeley, CA (US)

(72) Inventors: Andrew Paul May, San Francisco, CA (US); Rachel E. Haurwitz, Belmont, CA (US); Jennifer A. Doudna, Berkeley, CA (US); James M. Berger, Baltimore, MD (US); Matthew Merrill Carter, Berkeley, CA (US); Paul Daniel Donohoue, San Francisco, CA (US)

(73) Assignee: Caribou Biosciences, Inc., Berkeley, CA (US)

(21) Appl. No.: 19/020,523

(22) Filed: Jan. 14, 2025

Related U.S. Application Data
(63) Continuation of application No. 18/320,355, filed on May 19, 2023.
Application No. 18/320,355 is a continuation of application No. 15/904,285, filed on Feb. 23, 2018, now abandoned.
Application No. 15/904,285 is a continuation of application No. 14/977,514, filed on Dec. 21, 2015, now Pat. No. 9,909,122.
Application No. 14/977,514 is a continuation of application No. 14/416,338, filed on Jan. 22, 2015, now Pat. No. 9,260,752.
(60) Provisional application No. 61/781,598, filed on Mar. 14, 2013.
(60) Provisional application No. 61/818,386, filed on May 1, 2013.
(60) Provisional application No. 61/818,382, filed on May 1, 2013.
(60) Provisional application No. 61/822,002, filed on May 10, 2013.
(60) Provisional application No. 61/832,690, filed on Jun. 7, 2013.
(60) Provisional application No. 61/845,714, filed on Jul. 12, 2013.
(60) Provisional application No. 61/858,767, filed on Jul. 26, 2013.
(60) Provisional application No. 61/859,661, filed on Jul. 29, 2013.
(60) Provisional application No. 61/865,743, filed on Aug. 14, 2013.
(60) Provisional application No. 61/883,804, filed on Sep. 27, 2013.
(60) Provisional application No. 61/899,712, filed on Nov. 4, 2013.
(60) Provisional application No. 61/900,311, filed on Nov. 5, 2013.
(60) Provisional application No. 61/902,723, filed on Nov. 11, 2013.
(60) Provisional application No. 61/903,232, filed on Nov. 12, 2013.
(60) Provisional application No. 61/906,211, filed on Nov. 19, 2013.
(60) Provisional application No. 61/906,335, filed on Nov. 19, 2013.
(60) Provisional application No. 61/907,216, filed on Nov. 21, 2013.
(60) Provisional application No. 61/907,777, filed on Nov. 22, 2013.

(51) Int. Cl. C12N 15/11; A61K 38/46; A61K 47/54; A61K 47/64; C12N 9/22; C12N 15/10; C12N 15/113; C12N 15/52; C12N 15/85; C12N 15/90; C12Q 1/68; C12Q 1/6806; C12Q 1/6818; C12Q 1/686; C12Q 1/6869; C12Q 1/6874

(52) U.S. Cl. CPC C12N 15/11; A61K 38/465; A61K 47/549; A61K 47/6455; C12N 9/22; C12N 15/102; C12N 15/52; C12N 15/85; C12N 15/90; C12N 15/902; C12N 15/907; C12Q 1/68; C12Q 1/6806; C12Q 1/6818; C12Q 1/686; C12Q 1/6869; C12Q 1/6874; C12N 15/113; C12N 2310/20; C12N 2310/531; C12N 2310/533; C12N 2800/80

(57) ABSTRACT

This disclosure provides for compositions and methods for the use of nucleic acid-targeting nucleic acids and complexes thereof. Genome engineering can refer to altering the genome by deleting, inserting, mutating, or substituting specific nucleic acid sequences. The altering can be gene or location specific. Genome engineering can use nucleases to cut a nucleic acid thereby generating a site for the alteration. Engineering of non-genomic nucleic acid is also contemplated.

### CROSS-REFERENCE

[0001] This application is a continuation of U.S. patent application Ser. No. 14/977,514, filed Dec. 21, 2015, now allowed, which is a continuation of U.S. patent application Ser. No. 14/416,338, filed Jan. 22, 2015, now U.S. Pat. No. 9,260,752, issued Feb. 16, 2016, which is a National Stage Entry of International Application No. PCT/US2014/023828, filed on Mar. 12, 2014, now expired, which claims the benefit of U.S. Provisional Application No. 61/818,386, filed May 1, 2013, now expired, U.S. Provisional Application No. 61/902,723, filed Nov. 11, 2013, now expired, U.S. Provisional Application No. 61/818,382, filed May 1, 2013, now expired, U.S. Provisional Application No. 61/859,661, filed Jul. 29, 2013, now expired, U.S. Provisional Application No. 61/858,767, filed Jul. 26, 2013, now expired, U.S. Provisional Application No. 61/822,002, filed May 10, 2013, now expired, U.S. Provisional Application No. 61/832,690, filed Jun. 7, 2013, now expired, U.S. Provisional Application No. 61/906,211, filed Nov. 19, 2013, now expired, U.S. Provisional Application No. 61/900,311, filed Nov. 5, 2013, now expired, U.S. Provisional Application No. 61/845,714, filed Jul. 12, 2013, now expired, U.S. Provisional Application No. 61/883,804, filed Sep. 27, 2013, now expired, U.S. Provisional Application No. 61/781,598, filed Mar. 14, 2013, now expired, U.S. Provisional Application No. 61/899,712, filed Nov. 4, 2013, now expired, U.S. Provisional Application No. 61/865,743, filed Aug. 14, 2013, now expired, U.S. Provisional Application No. 61/907,777, filed Nov. 22, 2013, now expired, U.S. Provisional Application No. 61/903,232, filed Nov. 12, 2013, now expired, U.S. Provisional Application No. 61/906,335, filed Nov. 19, 2013, now expired, and U.S. Provisional Application No. 61/907,216, filed Nov. 21, 2013, now expired, each of which applications is incorporated herein by reference in its entirety.

### SEQUENCE LISTING

[0002] The present application contains a Sequence Listing that has been submitted electronically in ASCII format and is hereby incorporated by reference in its entirety. The ASCII copy, created on 13 Apr. 2017, is named CBI011-201_ST25.txt and is 8.1 MB in size.

### BACKGROUND OF THE INVENTION

[0003] Genome engineering can refer to altering the genome by deleting, inserting, mutating, or substituting specific nucleic acid sequences. The altering can be gene or location specific. Genome engineering can use nucleases to cut a nucleic acid thereby generating a site for the alteration. Engineering of non-genomic nucleic acid is also contemplated. A protein containing a nuclease domain can bind and cleave a target nucleic acid by forming a complex with a nucleic acid-targeting nucleic acid. In one example, the cleavage can introduce doublestranded breaks in the target nucleic acid. A nucleic acid can be repaired e.g. by endogenous non-homologous end joining (NHEJ) machinery. In a further example, a piece of nucleic acid can be inserted. Modifications of nucleic acid-targeting nucleic acids and site-directed polypeptides can introduce new functions to be used for genome engineering.

### SUMMARY OF THE INVENTION

[0004] In one aspect, the disclosure provides for an engineered nucleic acid-targeting nucleic acid comprising: a mutation in a P-domain of the nucleic acid-targeting nucleic acid. In some embodiments, the P-domain starts downstream of a last paired nucleotide of a duplex between a CRISPR repeat and a tracrRNA sequence of the nucleic acid-targeting nucleic acid. In some embodiments, the engineered nucleic acid-targeting nucleic acid further comprises a linker sequence. In some embodiments, the linker sequence links the CRISPR repeat and the tracrRNA sequence. In some embodiments, the engineered nucleic acid-targeting nucleic acid is an isolated engineered nucleic acid-targeting nucleic acid. In some embodiments, the engineered nucleic acid-targeting nucleic acid is a recombinant engineered nucleic acid-targeting nucleic acid. In some embodiments, the engineered nucleic acid-targeting nucleic acid is adapted to hybridize to a target nucleic acid. In some embodiments, the P-domain comprises 2 adjacent nucleotides. In some embodiments, the P-domain comprises 3 adjacent nucleotides. In some embodiments, the P-domain comprises 4 adjacent nucleotides. In some embodiments, the P-domain comprises 5 adjacent nucleotides. In some embodiments, the P-domain comprises 6 or more adjacent nucleotides. In some embodiments, the P-domain starts 1 nucleotide downstream of the last paired nucleotide of the duplex. In some embodiments, the P-domain starts 2 nucleotides downstream of the last paired nucleotide of the duplex. In some embodiments, the P-domain starts 3 nucleotides downstream of the last paired nucleotide of the duplex. In some embodiments, the P-domain starts 4 nucleotides downstream of the last paired nucleotide of the duplex. In some embodiments, the P-domain starts 5 nucleotides downstream of the last paired nucleotide of the duplex. In some embodiments, the P-domain starts 6 or more nucleotides downstream of the last paired nucleotide of the duplex. In some embodiments, the mutation comprises one or more mutations. In some embodiments, the one or more mutations are adjacent to each other. In some embodiments, the one or more mutations are separated from each other. In some embodiments, the mutation is adapted to allow the engineered nucleic acid-targeting nucleic acid to hybridize to a different protospacer adjacent motif. In some embodiments, the different protospacer adjacent motif comprises at least 4 nucleotides. In some embodiments, the different protospacer adjacent motif comprises at least 5 nucleotides. In some embodiments, the different protospacer adjacent motif comprises at least 6 nucleotides. In some embodiments, the different protospacer adjacent motif comprises at least 7 or more nucleotides. In some embodiments, the different protospacer adjacent motif comprises two non-adjacent regions. In some embodiments, the different protospacer adjacent motif comprises three non-adjacent regions. In some embodiments, the mutation is adapted to allow the engineered nucleic acid-targeting nucleic acid to bind to a target nucleic acid with a lower dissociation constant than an un-engineered nucleic acid-targeting nucleic acid. In some embodiments, the mutation is adapted to allow the engineered nucleic acid-targeting nucleic acid to bind to a target nucleic acid with greater specificity than an un-engineered nucleic acid-targeting nucleic acid. In some embodiments, the mutation is adapted to reduce binding of the engineered nucleic acid-targeting nucleic acid to a non-specific sequence in a target nucleic acid than an un-engineered nucleic acid-targeting nucleic acid. In some embodiments, the engineered nucleic acid-targeting nucleic acid further comprises two hairpins, wherein one of the two hairpins comprises a duplex between a polynucleotide comprising at least 50% identity to a CRISPR RNA over 6 contiguous nucleotides, and a polynucleotide comprising at least 50% identity to a tracrRNA over 6 contiguous nucleotides; and, wherein one of the two hairpins is 3′ of the first hairpin, wherein the second hairpin comprises an engineered P-domain. In some embodiments, the second hairpin is adapted to de-duplex when the nucleic acid is in contact with a target nucleic acid. In some embodiments, the P-domain is adapted to: hybridize with a first polynucleotide, wherein the first polynucleotide comprises a region of the engineered nucleic acid-targeting nucleic acid, hybridize to a second polynucleotide, wherein the second polynucleotide comprises a target nucleic acid, and hybridize specifically to the first or second polynucleotide. In some embodiments, the first polynucleotide comprises at least 50% identity to a tracrRNA over 6 contiguous nucleotides. In some embodiments, the first polynucleotide is located downstream of a duplex between a polynucleotide comprising at least 50% identity to a CRISPR repeat over 6 contiguous nucleotides, and a polynucleotide comprising at least 50% identity to a tracrRNA sequence over 6 contiguous nucleotides. In some embodiments, the second polynucleotide comprises a protospacer adjacent motif. In some embodiments, the engineered nucleic acid-targeting nucleic acid is adapted to bind to a site-directed polypeptide. In some embodiments, the mutation comprises an insertion of one or more nucleotides into the P-domain. In some embodiments, the mutation comprises deletion one or more nucleotides from the P-domain. In some embodiments, the mutation comprises mutation of one or more nucleotides. In some embodiments, the mutation is configured to allow the nucleic acid-targeting nucleic acid to hybridize to a different protospacer adjacent motif. In some embodiments, the different protospacer adjacent motif comprises a protospacer adjacent motif selected from the group consisting of: 5′-NGGNG-3′, 5′-NNAAAAW-3′, 5′-NNNNGATT-3′, 5′-GNNNCNNA-3′, and 5′-NNNACA-3′, or any combination thereof. In some embodiments, the mutation is configured to allow the engineered nucleic acid-targeting nucleic acid to bind with a lower dissociation constant than an un-engineered nucleic acid-targeting nucleic acid. In some embodiments, the mutation is configured to allow the engineered nucleic acid-targeting nucleic acid to bind with greater specificity than an un-engineered nucleic acid-targeting nucleic acid. In some embodiments, the mutation is configured to reduce binding of the engineered nucleic acid-targeting nucleic acid to a non-specific sequence in a target nucleic acid than an un-engineered nucleic acid-targeting nucleic acid.

[0005] In one aspect, the disclosure provides for a method for modifying a target nucleic acid comprising contacting a target nucleic acid with an engineered nucleic acid-targeting nucleic acid comprising: a mutation in a P-domain of the nucleic acid-targeting nucleic acid, and modifying the target nucleic acid. In some embodiments, the method further comprises inserting a donor polynucleotide into the target nucleic acid. In some embodiments, the modifying comprises cleaving the target nucleic acid. In some embodiments, the modifying comprises modifying transcription of the target nucleic acid.

[0006] In one aspect the disclosure provides for a vector comprising a polynucleotide sequence encoding an engineered nucleic acid-targeting nucleic acid comprising: a mutation in a P-domain of the nucleic acid-targeting nucleic acid.

[0007] In one aspect the disclosure provides for a kit comprising: an engineered nucleic acid-targeting nucleic acid comprising: a mutation in a P-domain of the nucleic acid-targeting nucleic acid; and a buffer. In some embodiments, the kit further comprises a site-directed polypeptide. In some embodiments, the kit further comprises a donor polynucleotide. In some embodiments, the kit further comprises instructions for use.

[0008] In one aspect, the disclosure provides for an engineered nucleic acid-targeting nucleic acid comprising: a mutation in a bulge region of a nucleic acid-targeting nucleic acid. In some embodiments, the bulge is located within a duplex between a CRISPR repeat and a tracrRNA sequence of the nucleic acid-targeting nucleic acid. In some embodiments, the engineered nucleic acid-targeting nucleic acid further comprises a linker sequence. In some embodiments, the linker sequence links the CRISPR repeat and the tracrRNA sequence. In some embodiments, the engineered nucleic acid-targeting nucleic acid is an isolated engineered nucleic acid-targeting nucleic acid. In some embodiments, the engineered nucleic acid-targeting nucleic acid is a recombinant engineered nucleic acid-targeting nucleic acid. In some embodiments, the bulge comprises at least 1 unpaired nucleotide on the CRISPR repeat, and 1 unpaired nucleotide on a the tracrRNA sequence. In some embodiments, the bulge comprises at least 1 unpaired nucleotide on the CRISPR repeat, and at least 2 unpaired nucleotides on a the tracrRNA sequence. In some embodiments, the bulge comprises at least 1 unpaired nucleotide on the CRISPR repeat, and at least 3 unpaired nucleotides on a the tracrRNA sequence. In some embodiments, the bulge comprises at least 1 unpaired nucleotide on the CRISPR repeat, and at least 4 unpaired nucleotides on a the tracrRNA sequence. In some embodiments, the bulge comprises at least one 1 unpaired nucleotide on the CRISPR repeat, and at least 5 unpaired nucleotides on a the tracrRNA sequence. In some embodiments, the bulge comprises at least 2 unpaired nucleotide on the CRISPR repeat, and 1 unpaired nucleotide on a the tracrRNA sequence. In some embodiments, the bulge comprises at least 3 unpaired nucleotide on the CRISPR repeat, and at least 2 unpaired nucleotides on a the tracrRNA sequence. In some embodiments, the bulge comprises at least 4 unpaired nucleotide on the CRISPR repeat, and at least 3 unpaired nucleotides on a the tracrRNA sequence. In some embodiments, the bulge comprises at least 5 unpaired nucleotide on the CRISPR repeat, and at least 4 unpaired nucleotides on the tracrRNA sequence. In some embodiments, the bulge comprises at least one nucleotide on the CRISPR repeat adapted to form a wobble pair with at least one nucleotide on the tracrRNA sequence. In some embodiments, the mutation comprises one or more mutations. In some embodiments, the one or more mutations are adjacent to each other. In some embodiments, the one or more mutations are separated from each other. In some embodiments, the mutation is adapted to allow the engineered nucleic acid-targeting nucleic acid to bind to a different site-directed polypeptide. In some embodiments, the different site-directed polypeptide is a homologue of Cas9. In some embodiments, the different site-directed polypeptide is a mutated version of Cas9. In some embodiments, the different site-directed polypeptide comprises 10% amino acid sequence identity to Cas9 in a nuclease domain selected from the group consisting of: a RuvC nuclease domain, and a HNH nuclease domain, or any combination thereof. In some embodiments, the mutation is adapted to allow the engineered nucleic acid-targeting nucleic acid to hybridize to a different protospacer adjacent motif. In some embodiments, the mutation is adapted to allow the engineered nucleic acid-targeting nucleic acid to bind to a site-directed polypeptide with a lower dissociation constant than an un-engineered nucleic acid-targeting nucleic acid. In some embodiments, the mutation is adapted to allow the engineered nucleic acid-targeting nucleic acid to bind to a site-directed polypeptide with greater specificity than an un-engineered nucleic acid-targeting nucleic acid. In some embodiments, the mutation is adapted to allow the engineered nucleic acid-targeting nucleic acid to direct a site-directed polypeptide to cleave a target nucleic acid with greater specificity than an un-engineered nucleic acid-targeting nucleic acid. In some embodiments, the mutation is adapted to reduce binding of the engineered nucleic acid-targeting nucleic acid to a non-specific sequence in a target nucleic acid than an un-engineered nucleic acid-targeting nucleic acid. In some embodiments, the engineered nucleic acid-targeting nucleic acid is adapted to hybridize to a target nucleic acid. In some embodiments, the mutation comprises insertion one or more nucleotides into the bulge. In some embodiments, the mutation comprises deletion of one or more nucleotides from the bulge. In some embodiments, the mutation comprises mutation of one or more nucleotides. In some embodiments, the mutation is configured to allow the engineered nucleic acid-targeting nucleic acid to hybridize to a different protospacer adjacent motif compared to an un-engineered nucleic acid-targeting nucleic acid. In some embodiments, the mutation is configured to allow the engineered nucleic acid-targeting nucleic acid to bind to a site-directed polypeptide with a lower dissociation constant than an un-engineered nucleic acid-targeting nucleic acid. In some embodiments, the mutation is configured to allow the engineered nucleic acid-targeting nucleic acid to bind to a site-directed polypeptide with greater specificity than an un-engineered nucleic acid-targeting nucleic acid. In some embodiments, the mutation is configured to reduce binding of the engineered nucleic acid-targeting nucleic acid to a non-specific sequence in a target nucleic acid than an un-engineered nucleic acid-targeting nucleic acid.

[0009] In one aspect the disclosure provides for a method for modifying a target nucleic acid comprising: contacting the target nucleic acid with an engineered nucleic acid-targeting nucleic acid comprising: a mutation in a bulge region of a nucleic acid-targeting nucleic acid; and modifying the target nucleic acid. In some embodiments, the method further comprises inserting a donor polynucleotide into the target nucleic acid. In some embodiments, the modifying comprises cleaving the target nucleic acid. In some embodiments, the modifying comprises modifying transcription of the target nucleic acid.

[0010] In one aspect the disclosure provides for a vector comprising a polynucleotide sequence encoding an engineered nucleic acid-targeting nucleic acid comprising: a mutation in a bulge region of a nucleic acid-targeting nucleic acid; and modifying the target nucleic acid.

[0011] In one aspect the disclosure provides for a kit comprising: an engineered nucleic acid-targeting nucleic acid comprising: a mutation in a bulge region of a nucleic acid-targeting nucleic acid; and modifying the target nucleic acid; and a buffer. In some embodiments, the kit further comprises a site-directed polypeptide. In some embodiments, the kit further comprises a donor polynucleotide. In some embodiments, the kit further comprises instructions for use.

[0012] In one aspect the disclosure provides for a method for producing a donor polynucleotide-tagged cell comprising: cleaving a target nucleic acid in a cell using a complex comprising a site-directed polypeptide and a nucleic acid-targeting nucleic acid, inserting a donor polynucleotide into a cleaved target nucleic acid, propagating the cell carrying the donor polynucleotide, and determining an origin of the donor-polynucleotide tagged cell. In some embodiments, the method is performed in vivo. In some embodiments, the method is performed in vitro. In some embodiments, the method is performed in situ. In some embodiments, the propagating produces a population of cells. In some embodiments, the propagating produces a cell line. In some embodiments, the method further comprises determining a nucleic acid sequence of a nucleic acid in the cell. In some embodiments, the nucleic acid sequence determines an origin of the cell. In some embodiments, the determining comprises determining a genotype of the cell. In some embodiments, the propagating comprises differentiating the cell. In some embodiments, the propagating comprises de-differentiating the cell. In some embodiments, the propagating comprises differentiating the cell and then dedifferentiating the cell. In some embodiments, the propagating comprises passaging the cell. In some embodiments, the propagating comprises inducing the cell to divide. In some embodiments, the propagating comprises inducing the cell to enter the cell cycle. In some embodiments, the propagating comprises the cell forming a metastasis. In some embodiments, the propagating comprises differentiating a pluripotent cell into a differentiated cell. In some embodiments, the cell is a differentiated cell. In some embodiments, the cell is a de-differentiated cell. In some embodiments, the cell is a stem cell. In some embodiments, the cell is a pluripotent stem cell. In some embodiments, the cell is a eukaryotic cell line. In some embodiments, the cell is a primary cell line. In some embodiments, the cell is a patient-derived cell line. In some embodiments, the method further comprises transplanting the cell into an organism. In some embodiments, the organism is a human. In some embodiments, the organism is a mammal. In some embodiments, the organism is selected from the group consisting of: a human, a dog, a rat, a mouse, a chicken, a fish, a cat, a plant, and a primate. In some embodiments, the method further comprises selecting the cell. In some embodiments, the donor polynucleotide is inserted into a target nucleic acid that is expressed in one cell state. In some embodiments, the donor polynucleotide is inserted into a target nucleic acid that is expressed in a plurality of cell types. In some embodiments, the donor polynucleotide is inserted into a target nucleic acid that is expressed in a pluripotent state. In some embodiments, the donor polynucleotide is inserted into a target nucleic acid that is expressed in a differentiated state.

[0013] In one aspect the disclosure provides for a method for making a clonally expanded cell line comprising: introducing into a cell a complex comprising: a site-directed polypeptide and a nucleic acid-targeting nucleic acid, contacting the complex to a target nucleic acid, cleaving the target nucleic acid, wherein the cleaving is performed by the complex, thereby producing a cleaved target nucleic acid, inserting a donor polynucleotide into the cleaved target nucleic acid, propagating the cell, wherein the propagating produces the clonally expanded cell line. In some embodiments, the cell is selected from the group consisting of: HeLa cell, Chinese Hamster Ovary cell, 293-T cell, a pheochromocytoma, a neuroblastomas fibroblast, a rhabdomyosarcoma, a dorsal root ganglion cell, a NSO cell, CV-I (ATCC CCL 70), COS-I (ATCC CRL 1650), COS-7 (ATCC CRL 1651), CHO-KI (ATCC CCL 61), 3T3 (ATCC CCL 92), NIH/3T3 (ATCC CRL 1658), HeLa (ATCC CCL 2), C 1271 (ATCC CRL 1616), BS-C-I (ATCC CCL 26), MRC-5 (ATCC CCL 171), L-cells, HEK-293 (ATCC CRL1 573) and PC 12 (ATCC CRL-1721), HEK293T (ATCC CRL-11268), RBL (ATCC CRL-1378), SH-SY5Y (ATCC CRL-2266), MDCK (ATCC CCL-34), SJ-RH30 (ATCC CRL-2061), HepG2 (ATCC HB-8065), ND7/23 (ECACC 92090903), CHO (ECACC 85050302). Vera (ATCC CCL 81), Caco-2 (ATCC HTB 37), K562 (ATCC CCL 243), Jurkat (ATCC TIB-152), Per.Có, Huvec (ATCC Human Primary PCS 100-010, Mouse CRL 2514, CRL 2515. CRL 2516), HuH-7D12 (ECACC 01042712), 293 (ATCC CRL 10852), A549 (ATCC CCL 185), IMR-90 (ATCC CCL 186), MCF-7 (ATC HTB-22), U-2 OS (ATCC HTB-96), and T84 (ATCC CCL 248), or any combination thereof. In some embodiments, the cell is stem cell. In some embodiments, the cell is a differentiated cell. In some embodiments, the cell is a pluripotent cell.

[0014] In one aspect the disclosure provides for a method for multiplex cell type analysis comprising: cleaving at least one target nucleic acid in two or more cells using a complex comprising a site-directed polypeptide and a nucleic acid-targeting nucleic acid, to create two cleaved target nucleic acids, inserting a different a donor polynucleotide into each of the cleaved target nucleic acids, and analyzing the two or more cells. In some embodiments, the analyzing comprises simultaneously analyzing the two or more cells. In some embodiments, the analyzing comprises determining a sequence of the target nucleic acid. In some embodiments, the analyzing comprises comparing the two or more cells. In some embodiments, the analyzing comprises determining a genotype of the two or more cells. In some embodiments, the cell is a differentiated cell. In some embodiments, the cell is a de-differentiated cell. In some embodiments, the cell is a stem cell. In some embodiments, the cell is a pluripotent stem cell. In some embodiments, the cell is a eukaryotic cell line. In some embodiments, the cell is a primary cell line. In some embodiments, the cell is a patient-derived cell line. In some embodiments, a plurality of donor polynucleotides are inserted into a plurality of cleaved target nucleic acids in the cell.

[0015] In one aspect, the disclosure provides for a composition comprising: an engineered nucleic acid-targeting nucleic acid comprising a 3′ hybridizing extension, and a donor polynucleotide, wherein the donor polynucleotide is hybridized to the 3′ hybridizing extension. In some embodiments, the 3′ hybridizing extension is adapted to hybridize to at least 5 nucleotides from the 3′ of the donor polynucleotide. In some embodiments, the 3′ hybridizing extension is adapted to hybridize to at least 5 nucleotides from the 5′ of the donor polynucleotide. In some embodiments, the 3′ hybridizing extension is adapted to hybridize to at least 5 adjacent nucleotides in the donor polynucleotide. In some embodiments, the 3′ hybridizing extension is adapted to hybridize to all of the donor polynucleotide. In some embodiments, the 3′ hybridizing extension comprises a reverse transcription template. In some embodiments, the reverse transcription template is adapted to be reverse transcribed by a reverse transcriptase. In some embodiments, the composition further comprises a reverse transcribed DNA polynucleotide. In some embodiments, the reverse transcribed DNA polynucleotide is adapted to hybridize to the reverse transcription template. In some embodiments, the donor polynucleotide is DNA. In some embodiments, the 3′ hybridizing extension is RNA. In some embodiments, the engineered nucleic acid-targeting nucleic acid is an isolated engineered nucleic acid-targeting nucleic acid. In some embodiments, the engineered nucleic acid-targeting nucleic acid is a recombinant engineered nucleic acid-targeting nucleic acid.

[0016] In one aspect the disclosure provides for a method for introducing a donor polynucleotide into a target nucleic acid comprising: contacting the target nucleic acid with a composition comprising: an engineered nucleic acid-targeting nucleic acid comprising a 3′ hybridizing extension, and a donor polynucleotide, wherein the donor polynucleotide is hybridized to the 3′ hybridizing extension. In some embodiments, the method further comprises cleaving the target nucleic acid to produce a cleaved target nucleic acid. In some embodiments, the cleaving is performed by a site-directed polypeptide. In some embodiments, the method further comprises inserting the donor polynucleotide into the cleaved target nucleic acid.

[0017] In one aspect, the disclosure provides for a composition comprising: an effector protein, and a nucleic acid, wherein the nucleic acid comprises at least 50% sequence identity to a crRNA over 6 contiguous nucleotides, at least 50% sequence identity to a tracrRNA over 6 contiguous nucleotides; and a non-native sequence, wherein the nucleic acid is adapted to bind to the effector protein. In some embodiments, the composition further comprises a polypeptide comprising at least 10% amino acid sequence identity to a nuclease domain of Cas9, wherein the nucleic acid binds to the polypeptide. In some embodiments, the polypeptide comprises at least 60% amino acid sequence identity in a nuclease domain to a nuclease domain of Cas9. In some embodiments, the polypeptide is Cas9. In some embodiments, the nucleic acid further comprises a linker sequence, wherein the linker sequence links the sequence comprising at least 50% sequence identity to a crRNA over 6 contiguous nucleotides and the sequence comprising at least 50% sequence identity to a tracrRNA over 6 contiguous nucleotides. In some embodiments, the non-native sequence is located at a position of the nucleic acid selected from the group consisting of: a 5′ end and a 3′ end, or any combination thereof. In some embodiments, the nucleic acid comprises two nucleic acid molecules. In some embodiments, the nucleic acid comprises a single continuous nucleic acid molecule. In some embodiments, the non-native sequence comprises a CRISPR RNA-binding protein binding sequence. In some embodiments, the non-native sequence comprises a binding sequence selected from the group consisting of: a Cas5 RNA-binding sequence, a Cas6 RNA-binding sequence, and a Csy4 RNA-binding sequence, or any combination thereof. In some embodiments, the effector protein comprises a CRISPR RNA-binding protein. In some embodiments, the effector protein comprises at least 15% amino acid sequence identity to a protein selected from the group consisting of: Cas5, Cas6, and Csy4, or any combination thereof. In some embodiments, an RNA-binding domain of the effector protein comprises at least 15% amino acid sequence identity to an RNA-binding domain of a protein selected from the group consisting of: Cas5, Cas6, and Csy4, or any combination thereof. In some embodiments, the effector protein is selected from the group consisting of: Cas5, Cas6, and Csy4, or any combination thereof. In some embodiments, the effector protein further comprises one or more non-native sequences. In some embodiments, the non-native sequence confers an enzymatic activity to the effector protein. In some embodiments, the enzymatic activity is selected from the group consisting of: methyltransferase activity, demethylase activity, acetylation activity, deacetylation activity, ubiquitination activity, deubiquitination activity, deamination activity, dismutase activity, alkylation activity, depurination activity, oxidation activity, pyrimidine dimer forming activity, transposase activity, recombinase activity, polymerase activity, ligase activity, helicase activity, photolyase activity or glycosylase activity, acetyltransferase activity, deacetylase activity, kinase activity, phosphatase activity, ubiquitin ligase activity, deubiquitinating activity, adenylation activity, deadenylation activity, SUMOylating activity, deSUMOylating activity, ribosylation activity, deribosylation activity, myristoylation activity, remodelling activity, protease activity, oxidoreductase activity, transferase activity, hydrolase activity, lyase activity, isomerase activity, synthase activity, synthetase activity, and demyristoylation activity, or any combination thereof. In some embodiments, the nucleic acid is RNA. In some embodiments, the effector protein comprises a fusion protein comprising an RNA-binding protein and a DNA-binding protein. In some embodiments, the composition further comprises a donor polynucleotide. In some embodiments, the donor polynucleotide is bound directly to the DNA binding protein, and wherein the RNA binding protein is bound to the nucleic acid-targeting nucleic acid. In some embodiments, the 5′ end of the donor polynucleotide is bound to the DNA-binding protein. In some embodiments, the 3′ end of the donor polynucleotide is bound to the DNA-binding protein. In some embodiments, at least 5 nucleotides of the donor polynucleotide bind to the DNA-binding protein. In some embodiments, the nucleic acid is an isolated nucleic acid. In some embodiments, the nucleic acid is a recombinant nucleic acid.

[0018] In one aspect, the disclosure provides for a method for introducing a donor polynucleotide into a target nucleic acid comprising: contacting a target nucleic acid with a complex comprising a site-directed polypeptide and a composition comprising: an effector protein, and a nucleic acid, wherein the nucleic acid comprises at least 50% sequence identity to a crRNA over 6 contiguous nucleotides, at least 50% sequence identity to a tracrRNA over 6 contiguous nucleotides; and a non-native sequence, wherein the nucleic acid is adapted to bind to the effector protein. In some embodiments, the method further comprises cleaving the target nucleic acid. In some embodiments, the cleaving is performed by the site-directed polypeptide. In some embodiments, the method further comprises inserting the donor polynucleotide into the target nucleic acid.

[0019] In one aspect the disclosure provides for a method for modulating a target nucleic acid comprising: contacting a target nucleic acid with one or more complexes, each complex comprising a site-directed polypeptide and a composition comprising: an effector protein, and a nucleic acid, wherein the nucleic acid comprises at least 50% sequence identity to a crRNA over 6 contiguous nucleotides, at least 50% sequence identity to a tracrRNA over 6 contiguous nucleotides; and a non-native sequence, wherein the nucleic acid is adapted to bind to the effector protein, and modulating the target nucleic acid. In some embodiments, the site-directed polypeptide comprises at least 10% amino acid sequence identity to a nuclease domain of Cas9. In some embodiments, the modulating is performed by the effector protein. In some embodiments, the modulating comprises an activity selected from the group consisting of: methyltransferase activity, demethylase activity, acetylation activity, deacetylation activity, ubiquitination activity, deubiquitination activity, deamination activity, dismutase activity, alkylation activity, depurination activity, oxidation activity, pyrimidine dimer forming activity, transposase activity, recombinase activity, polymerase activity, ligase activity, helicase activity, photolyase activity or glycosylase activity, acetyltransferase activity, deacetylase activity, kinase activity, phosphatase activity, ubiquitin ligase activity, deubiquitinating activity, adenylation activity, deadenylation activity, SUMOylating activity, deSUMOylating activity, ribosylation activity, deribosylation activity, myristoylation activity, remodelling activity, protease activity, oxidoreductase activity, transferase activity, hydrolase activity, lyase activity, isomerase activity, synthase activity, synthetase activity, and demyristoylation activity, or any combination thereof. In some embodiments, the effector protein comprises one or more effector proteins.

[0020] In one aspect the disclosure provides for a method for detecting if two complexes are in proximity to one another comprising: contacting a first target nucleic acid with a first complex, wherein the first complex comprises a first site-directed polypeptide, a first modified nucleic acid-targeting nucleic acid, and a first effector protein, wherein the effector protein is adapted to bind to the modified nucleic acid-targeting nucleic acid, and wherein the first effector protein comprises a non-native sequence that comprises a first portion of a split system, and contacting a second target nucleic acid with a second complex, wherein the second complex comprises a second site-directed polypeptide, a second modified nucleic acid-targeting nucleic acid, and a second effector protein, wherein the effector protein is adapted to bind to the modified nucleic acid-targeting nucleic acid, and wherein the second effector protein comprises a non-native sequence that comprises a second portion of a split system. In some embodiments, the first target nucleic acid and the second target nucleic acid are on the same polynucleotide polymer. In some embodiments, the split system comprises two or more protein fragments that individually are not active, but, when formed into a complex, result in an active protein complex. In some embodiments, the method further comprises detecting an interaction between the first portion and the second portion. In some embodiments, the detecting indicates the first and second complex are in proximity to one another. In some embodiments, the site-directed polypeptide is adapted to be unable to cleave the target nucleic acid. In some embodiments, the detecting comprises determining the occurrence of a genetic mobility event. In some embodiments, the genetic mobility event comprises a translocation. In some embodiments, prior to the genetic mobility event the two portions of the split system do not interact. In some embodiments, after the genetic mobility event the two portions of the split system do interact. In some embodiments, the genetic mobility event is a translocation between a BCR and an Ab1 gene. In some embodiments, the interaction activates the split system. In some embodiments, the interaction indicates the target nucleic acids bound by the complexes are close together. In some embodiments, the split system is selected from the group consisting of: split GFP system, a split ubiquitin system, a split transcription factor system, and a split affinity tag system, or any combination thereof. In some embodiments, the split system comprises a split GFP system. In some embodiments, the detecting indicates a genotype. In some embodiments, the method further comprises: determining a course of treatment for a disease based on the genotype. In some embodiments, the method further comprises treating the disease. In some embodiments, the treating comprises administering a drug. In some embodiments, the treating comprises administering a complex comprising a nucleic acid-targeting nucleic acid and a site-directed polypeptide, wherein the complex can modify a genetic element involved in the disease. In some embodiments, the modifying is selected from the group consisting of: adding a nucleic acid sequence to the genetic element, substituting a nucleic acid sequence in the genetic element, and deleting a nucleic acid sequence from the genetic element, or any combination thereof. In some embodiments, the method further comprises: communicating the genotype from a caregiver to a patient. In some embodiments, the communicating comprises communicating from a storage memory system to a remote computer. In some embodiments, the detecting diagnoses a disease. In some embodiments, the method further comprises: communicating the diagnosis from a caregiver to a patient. In some embodiments, the detecting indicates the presence of a single nucleotide polymorphism (SNP). In some embodiments, the method further comprises: communicating the occurrence of a genetic mobility event from a caregiver to a patient. In some embodiments, the communicating comprises communicating from a storage memory system to a remote computer. In some embodiments, the site-directed polypeptide comprises at least 20% amino acid sequence identity to Cas9. In some embodiments, the site-directed polypeptide comprises at least 60% amino acid sequence identity to Cas9. In some embodiments, the site-directed polypeptide comprises at least 60% amino acid sequence identity in a nuclease domain to a nuclease domain of Cas9. In some embodiments, the site-directed polypeptide is Cas9. In some embodiments, the modified nucleic acid-targeting nucleic acid comprises a non-native sequence. In some embodiments, the non-native sequence is located at a position of the modified nucleic acid-targeting nucleic acid selected from the group consisting of: a 5′ end, and a 3′ end, or any combination thereof. In some embodiments, the modified nucleic acid-targeting nucleic acid comprises two nucleic acid molecules. In some embodiments, the nucleic acid comprises a single continuous nucleic acid molecule comprising a first portion comprising at least 50% identity to a CRISPR repeat over 6 contiguous nucleotides and a second portion comprising at least 50% identity to a tracrRNA sequence over 6 contiguous nucleotides. In some embodiments, the first portion and the second portion are linked by a linker. In some embodiments, the non-native sequence comprises a CRISPR RNA-binding protein binding sequence. In some embodiments, the non-native sequence comprises a binding sequence selected from the group consisting of: a Cas5 RNA-binding sequence, a Cas6 RNA-binding sequence, and a Csy4 RNA-binding sequence, or any combination thereof. In some embodiments, the modified nucleic acid-targeting nucleic acid is adapted to bind to an effector protein. In some embodiments, the effector protein is a CRISPR RNA-binding protein. In some embodiments, the effector protein comprises at least 15% amino acid sequence identity to a protein selected from the group consisting of: Cas5, Cas6, and Csy4, or any combination thereof. In some embodiments, a RNA-binding domain of the effector protein comprises at least 15% amino acid sequence identity to an RNA-binding domain of a protein selected from the group consisting of: Cas5, Cas6, and Csy4, or any combination thereof. In some embodiments, the effector protein is selected from the group consisting of: Cas5, Cas6, and Csy4, or any combination thereof. In some embodiments, the nucleic acid-targeting nucleic acid is RNA. In some embodiments, the target nucleic acid is DNA. In some embodiments, the interaction comprises forming an affinity tag. In some embodiments, the detecting comprises capturing the affinity tag. In some embodiments, the method further comprises sequencing nucleic acid bound to the first and second complexes. In some embodiments, the method further comprises fragmenting the nucleic acid prior to the capturing. In some embodiments, the interaction forms an activated system. In some embodiments, the method further comprises altering transcription of a first target nucleic acid or a second target nucleic acid, wherein the altering is performed by the activated system. In some embodiments, the second target nucleic acid is unattached to the first target nucleic acid. In some embodiments, the altering transcription of the second target nucleic acid is performed in trans. In some embodiments, the altering transcription of the first target nucleic acid is performed in cis. In some embodiments, the first or second target nucleic acid is selected from the group consisting of: an endogenous nucleic acid, and an exogenous nucleic acid, or any combination thereof. In some embodiments, the altering comprises increasing transcription of the first or second target nucleic acids. In some embodiments, the first or second target nucleic acid comprises a polynucleotide encoding one or more genes that cause cell death. In some embodiments, the first or second target nucleic acid comprises a polynucleotide encoding a cell-lysis inducing peptide. In some embodiments, the first or second target nucleic acid comprises a polynucleotide encoding an immune-cell recruiting antigen. In some embodiments, the first or second target nucleic acid comprises a polynucleotide encoding one or more genes involved in apoptosis. In some embodiments, the one or more genes involved in apoptosis comprises caspases. In some embodiments, the one or more genes involved in apoptosis comprises cytokines. In some embodiments, the one or more genes involved in apoptosis are selected from the group consisting of: tumor necrosis factor (TNF), TNF receptor 1 (TNFR1), TNF receptor 2 (TNFR2), Fas receptor, FasL, caspase-8, caspase-10, caspase-3, caspase-9, caspase-3, caspase-6, caspase-7, Bcl-2, and apoptosis inducing factor (AIF), or any combination thereof. In some embodiments, the first or second target nucleic acid comprises a polynucleotide encoding one or more nucleic acid-targeting nucleic acids. In some embodiments, the one or more nucleic acid-targeting nucleic acids target a plurality of target nucleic acids. In some embodiments, the detecting comprises generating genetic data. In some embodiments, the method further comprises communicating the genetic data from a storage memory system to a remote computer. In some embodiments, the genetic data indicates a genotype. In some embodiments, the genetic data indicates the occurrence of a genetic mobility event. In some embodiments, the genetic data indicates a spatial location of genes.

[0021] In one aspect, the disclosure provides for a kit comprising: a site-directed polypeptide, a modified nucleic acid-targeting nucleic acid, wherein the modified nucleic acid-targeting nucleic acid comprises a non-native sequence, an effector protein that is adapted to bind to the non-native sequence, and a buffer. In some embodiments, the kit further comprises instructions for use.

[0022] In one aspect the disclosure provides for a vector comprising a polynucleotide sequence encoding a modified nucleic acid-targeting nucleic acid, wherein the modified nucleic acid-targeting nucleic acid comprises a non-native sequence. In some embodiments, the polynucleotide sequence is operably linked to a promoter. In some embodiments, the promoter is an inducible promoter.

[0023] In one aspect the disclosure provides for a vector comprising: a polynucleotide sequence encoding: a modified nucleic acid-targeting nucleic acid, wherein the modified nucleic acid-targeting nucleic acid comprises a sequence configured to bind to an effector protein, and a site-directed polypeptide. In some embodiments, the polynucleotide sequence is operably linked to a promoter. In some embodiments, the promoter is an inducible promoter.

[0024] In one aspect, the disclosure provides for a vector comprising: a polynucleotide sequence encoding: a modified nucleic acid-targeting nucleic acid, wherein the modified nucleic acid-targeting nucleic acid comprises a non-native sequence, a site-directed polypeptide, and an effector protein. In some embodiments, the polynucleotide sequence is operably linked to a promoter. In some embodiments, the promoter is an inducible promoter.

[0025] In one aspect the disclosure provides for a genetically modified cell comprising a composition comprising: an effector protein, and a nucleic acid, wherein the nucleic acid comprises at least 50% sequence identity to a crRNA over 6 contiguous nucleotides, at least 50% sequence identity to a tracrRNA over 6 contiguous nucleotides; and a non-native sequence, wherein the nucleic acid is adapted to bind to the effector protein.

[0026] In one aspect the disclosure provides for a genetically modified cell comprising a vector comprising a polynucleotide sequence encoding a modified nucleic acid-targeting nucleic acid, wherein the modified nucleic acid-targeting nucleic acid comprises a non-native sequence.

[0027] In one aspect the disclosure provides for a genetically modified cell comprising a vector comprising: a polynucleotide sequence encoding: a modified nucleic acid-targeting nucleic acid, wherein the modified nucleic acid-targeting nucleic acid comprises a sequence configured to bind to an effector protein, and a site-directed polypeptide.

[0028] In one aspect the disclosure provides for a genetically modified cell comprising a vector comprising: a polynucleotide sequence encoding: a modified nucleic acid-targeting nucleic acid, wherein the modified nucleic acid-targeting nucleic acid comprises a non-native sequence, a site-directed polypeptide, and an effector protein.

[0029] In one aspect the disclosure provides for a kit comprising: a vector comprising a polynucleotide sequence encoding a modified nucleic acid-targeting nucleic acid, wherein the modified nucleic acid-targeting nucleic acid comprises a non-native sequence, and a buffer. In some embodiments, the kit further comprises instructions for use.

[0030] In one aspect the disclosure provides for a kit comprising: a vector comprising: a polynucleotide sequence encoding: a modified nucleic acid-targeting nucleic acid, wherein the modified nucleic acid-targeting nucleic acid comprises a sequence configured to bind to an effector protein, and a site-directed polypeptide, and a buffer. In some embodiments, the kit further comprises instructions for use.

[0031] In one aspect the disclosure provides for a kit comprising: a vector comprising: a polynucleotide sequence encoding: a modified nucleic acid-targeting nucleic acid, wherein the modified nucleic acid-targeting nucleic acid comprises a non-native sequence, a site-directed polypeptide, and an effector protein, and a buffer. In some embodiments, the kit further comprises instructions for use.

[0032] In one aspect, the disclosure provides for a composition comprising: a multiplexed genetic targeting agent, wherein the multiplexed genetic targeting agent comprises one or more nucleic acid modules, wherein the nucleic acid module comprises a non-native sequence, and wherein the nucleic acid module is configured to bind to a polypeptide comprising at least 10% amino acid sequence identity to a nuclease domain of Cas9 and wherein the nucleic acid module is configured to hybridize to a target nucleic acid. In some embodiments, the nucleic acid module comprises a first sequence comprising at least 50% sequence identity to a crRNA over 6 contiguous nucleotides, and a second sequence comprising at least 50% sequence identity to a tracrRNA over 6 contiguous nucleotides. In some embodiments, the composition further comprises a linker sequence that links the first and second sequences. In some embodiments, the one or more nucleic acid modules hybridize to one or more target nucleic acids. In some embodiments, the one or more nucleic acid modules differ by at least one nucleotide in a spacer region of the one or more nucleic acid modules. In some embodiments, the one or more nucleic acid modules is RNA. In some embodiments, the multiplexed genetic targeting agent is RNA. In some embodiments, the non-native sequence comprises a ribozyme. In some embodiments, the non-native sequence comprises an endoribonuclease binding sequence. In some embodiments, the endoribonuclease binding sequence is located at a 5′ end of the nucleic acid module. In some embodiments, the endoribonuclease binding sequence is located at a 3′ end of the nucleic acid module. In some embodiments, the endoribonuclease binding sequence is adapted to be bound by a CRISPR endoribonuclease. In some embodiments, the endoribonuclease binding sequence is adapted to be bound by an endoribonuclease comprising a RAMP domain. In some embodiments, the endoribonuclease binding sequence is adapted to be bound by an endoribonuclease selected from the group consisting of: a Cas5 superfamily member endoribonuclease, and a Cas6 superfamily member endoribonuclease, or any combination thereof. In some embodiments, the endoribonuclease binding sequence is adapted to be bound by an endoribonuclease comprising at least 15% amino acid sequence identity to a protein selected from the group consisting of: Csy4, Cas5, and Cas6. In some embodiments, the endoribonuclease binding sequence is adapted to be bound by an endoribonuclease comprising at least 15% amino acid sequence identity to a nuclease domain of a protein selected from the group consisting of: Csy4, Cas5, and Cas6. In some embodiments, the endoribonuclease binding sequence comprises a hairpin. In some embodiments, the hairpin comprises at least 4 consecutive nucleotides in a stem loop structure. In some embodiments, the endoribonuclease binding sequence comprises at least 60% identity to a sequence selected from the group consisting of:

(SEQ ID NO: 1347)
5′-GUUCACUGCCGUAUAGGCAGCUAAGAAA-3′;
(SEQ ID NO: 1348)
5′-GUUGCAAGGGAUUGAGCCCCGUAAGGGGAUUGCGAC-3′;
(SEQ ID NO: 1349)
5′-GUUGCAAACCUCGUUAGCCUCGUAGAGGAUUGAAAC-3′;
(SEQ ID NO: 1350)
5′-GGAUCGAUACCCACCCCGAAGAAAAGGGGACGAGAAC-3′;
(SEQ ID NO: 1351)
5′-GUCGUCAGACCCAAAACCCCGAGAGGGGACGGAAAC-3′;
(SEQ ID NO: 1352)
5′-GAUAUAAACCUAAUUACCUCGAGAGGGGACGGAAAC-3′;
(SEQ ID NO: 1353)
5′-CCCCAGUCACCUCGGGAGGGGACGGAAAC-3′;
(SEQ ID NO: 1354)
5′-GUUCCAAUUAAUCUUAAACCCUAUUAGGGAUUGAAAC-3′;
(SEQ ID NO: 1348)
5′-GUUGCAAGGGAUUGAGCCCCGUAAGGGGAUUGCGAC-3′;
(SEQ ID NO: 1349)
5′-GUUGCAAACCUCGUUAGCCUCGUAGAGGAUUGAAAC-3′;
(SEQ ID NO: 1350)
5′-GGAUCGAUACCCACCCCGAAGAAAAGGGGACGAGAAC-3′;
(SEQ ID NO: 1351)
5′-GUCGUCAGACCCAAAACCCCGAGAGGGGACGGAAAC-3′;
(SEQ ID NO: 1352)
5′-GAUAUAAACCUAAUUACCUCGAGAGGGGACGGAAAC-3′;
(SEQ ID NO: 1353)
5′-CCCCAGUCACCUCGGGAGGGGACGGAAAC-3′;
(SEQ ID NO: 1354)
5′-GUUCCAAUUAAUCUUAAACCCUAUUAGGGAUUGAAAC-3′;
(SEQ ID NO: 1355)
5′-GUCGCCCCCCACGCGGGGGCGUGGAUUGAAAC-3′;
(SEQ ID NO: 1356)
5′-CCAGCCGCCUUCGGGCGGCUGUGUGUUGAAAC-3′;
(SEQ ID NO: 1357)
5′-GUCGCACUCUACAUGAGUGCGUGGAUUGAAAU-3′;
(SEQ ID NO: 1358)
5′-UGUCGCACCUUAUAUAGGUGCGUGGAUUGAAAU-3′;
and
(SEQ ID NO: 1359)
5′-GUCGCGCCCCGCAUGGGGCGCGUGGAUUGAAA-3′;

or any combination thereof. In some embodiments, the one or more nucleic acid modules are adapted to be bound by different endoribonucleases. In some embodiments, the multiplexed genetic target agent is an isolated multiplexed genetic targeting agent. In some embodiments, the multiplexed genetic target agent is a recombinant multiplexed genetic target agent.

[0033] In one aspect the disclosure provides for a vector comprising a polynucleotide sequence encoding a multiplexed genetic targeting agent, wherein the multiplexed genetic targeting agent comprises one or more nucleic acid modules, wherein the nucleic acid module comprises a non-native sequence, and wherein the nucleic acid module is configured to bind to a polypeptide comprising at least 10% amino acid sequence identity to a nuclease domain of Cas9 and wherein the nucleic acid module is configured to hybridize to a target nucleic acid. In some embodiments, the polynucleotide sequence is operably linked to a promoter. In some embodiments, the promoter is an inducible promoter.

[0034] In one aspect, the disclosure provides for a genetically modified cell comprising a multiplexed genetic targeting agent, wherein the multiplexed genetic targeting agent comprises one or more nucleic acid modules, wherein the nucleic acid module comprises a non-native sequence, and wherein the nucleic acid module is configured to bind to a polypeptide comprising at least 10% amino acid sequence identity to a nuclease domain of Cas9 and wherein the nucleic acid module is configured to hybridize to a target nucleic acid.

[0035] In one aspect the disclosure provides for a genetically modified cell comprising a vector comprising a polynucleotide sequence encoding a multiplexed genetic targeting agent, wherein the multiplexed genetic targeting agent comprises one or more nucleic acid modules, wherein the nucleic acid module comprises a non-native sequence, and wherein the nucleic acid module is configured to bind to a polypeptide comprising at least 10% amino acid sequence identity to a nuclease domain of Cas9 and wherein the nucleic acid module is configured to hybridize to a target nucleic acid.

[0036] In one aspect the disclosure provides for a kit comprising a multiplexed genetic targeting agent, wherein the multiplexed genetic targeting agent comprises one or more nucleic acid modules, wherein the nucleic acid module comprises a non-native sequence, and wherein the nucleic acid module is configured to bind to a polypeptide comprising at least 10% amino acid sequence identity to a nuclease domain of Cas9 and wherein the nucleic acid module is configured to hybridize to a target nucleic acid, and a buffer. In some embodiments, the kit further comprises instructions for use.

[0037] In one aspect the disclosure provides for a kit comprising: a vector comprising a polynucleotide sequence encoding a multiplexed genetic targeting agent, wherein the multiplexed genetic targeting agent comprises one or more nucleic acid modules, wherein the nucleic acid module comprises a non-native sequence, and wherein the nucleic acid module is configured to bind to a polypeptide comprising at least 10% amino acid sequence identity to a nuclease domain of Cas9 and wherein the nucleic acid module is configured to hybridize to a target nucleic acid, and a buffer. In some embodiments, the kit further comprises instructions for use.

[0038] In one aspect the disclosure provides for a method for generating a nucleic acid, wherein the nucleic acid binds to a polypeptide comprising at least 10% amino acid sequence identity to a nuclease domain of Cas9 and hybridizes to a target nucleic acid comprising: introducing the a multiplexed genetic targeting agent, wherein the multiplexed genetic targeting agent comprises one or more nucleic acid modules, wherein the nucleic acid module comprises a non-native sequence, and wherein the nucleic acid module is configured to bind to a polypeptide comprising at least 10% amino acid sequence identity to a nuclease domain of Cas9 and wherein the nucleic acid module is configured to hybridize to a target nucleic acid into a host cell, processing the multiplexed genetic targeting agent into the one or more nucleic acid modules, and contacting the processed one or more nucleic acid modules to one or more target nucleic acids in the cell. In some embodiments, the method further comprises cleaving the target nucleic acid. In some embodiments, the method further comprises modifying the target nucleic acid. In some embodiments, the modifying comprises altering transcription of the target nucleic acid. In some embodiments, the modifying comprises inserting a donor polynucleotide into the target nucleic acid.

[0039] In one aspect the disclosure provides for a modified site-directed polypeptide comprising: a first nuclease domain, a second nuclease domain, and an inserted nuclease domain. In some embodiments, the site-directed polypeptide comprises at least 15% identity to a nuclease domain of Cas9. In some embodiments, the first nuclease domain comprises a nuclease domain selected from the group consisting of: a HNH domain, and a RuvC domain, or any combination thereof. In some embodiments, the second nuclease domain comprises a nuclease domain selected from the group consisting of: a HNH domain, and a RuvC domain, or any combination thereof. In some embodiments, the inserted nuclease domain comprises a HNH domain. In some embodiments, the inserted nuclease domain comprises a RuvC domain. In some embodiments, the inserted nuclease domain is N-terminal to the first nuclease domain. In some embodiments, the inserted nuclease domain is N-terminal to the second nuclease domain. In some embodiments, the inserted nuclease domain is C-terminal to the first nuclease domain. In some embodiments, the inserted nuclease domain is C-terminal to the second nuclease domain. In some embodiments, the inserted nuclease domain is in tandem to the first nuclease domain. In some embodiments, the inserted nuclease domain is in tandem to the second nuclease domain. In some embodiments, the inserted nuclease domain is adapted to cleave a target nucleic acid at a site different than the first or second nuclease domains. In some embodiments, the inserted nuclease domain is adapted to cleave an RNA in a DNA-RNA hybrid. In some embodiments, the inserted nuclease domain is adapted to cleave a DNA in a DNA-RNA hybrid. In some embodiments, the inserted nuclease domain is adapted to increase specificity of binding of the modified site-directed polypeptide to a target nucleic acid. In some embodiments, the inserted nuclease domain is adapted to increase strength of binding of the modified site-directed polypeptide to a target nucleic acid.

[0040] In one aspect the disclosure provides for a vector comprising a polynucleotide sequence encoding a modified site-directed polypeptide comprising: a first nuclease domain, a second nuclease domain, and an inserted nuclease domain.

[0041] In one aspect the disclosure provides for a kit comprising: a modified site-directed polypeptide comprising: a first nuclease domain, a second nuclease domain, and an inserted nuclease domain, and a buffer. In some embodiments, the kit further comprises instructions for use.

[0042] In one aspect the disclosure provides for a composition comprising: a modified site-directed polypeptide, wherein the polypeptide is modified such that it is adapted to target a second protospacer adjacent motif compared to a wild-type site-directed polypeptide. In some embodiments, the site-directed polypeptide is modified by a modification selected from the group consisting of: an amino acid addition, an amino acid substitution, an amino acid replacement, and an amino acid deletion, or any combination thereof. In some embodiments, the modified site-directed polypeptide comprises a non-native sequence. In some embodiments, the modified site-directed polypeptide is adapted to target the second protospacer adjacent motif with greater specificity than the wild-type site-directed polypeptide. In some embodiments, the modified site-directed polypeptide is adapted to target the second protospacer adjacent motif with a lower dissociation constant compared to the wild-type site-directed polypeptide. In some embodiments, the modified site-directed polypeptide is adapted to target the second protospacer adjacent motif with a higher dissociation constant compared to the wild-type site-directed polypeptide. In some embodiments, the second protospacer adjacent motif comprises a protospacer adjacent motif selected from the group consisting of: 5′-NGGNG-3′, 5′-NNAAAAW-3′, 5′-NNNNGATT-3′, 5′-GNNNCNNA-3′, and 5′-NNNACA-3′, or any combination thereof.

[0043] In one aspect the disclosure provides for a vector comprising a polynucleotide sequence encoding a modified site-directed polypeptide, wherein the polypeptide is modified such that it is adapted to target a second protospacer adjacent motif compared to a wild-type site-directed polypeptide.

[0044] In one aspect the disclosure provides for a kit comprising: a modified site-directed polypeptide, wherein the polypeptide is modified such that it is adapted to target a second protospacer adjacent motif compared to a wild-type site-directed polypeptide, and a buffer. In some embodiments, the kit further comprises instructions for use.

[0045] In one aspect the disclosure provides for a composition comprising: a modified site-directed polypeptide, wherein the polypeptide is modified such that it is adapted to target a second nucleic acid-targeting nucleic acid compared to a wild-type site-directed polypeptide. In some embodiments, the site-directed polypeptide is modified by a modification selected from the group consisting of: an amino acid addition, an amino acid substitution, an amino acid replacement, and an amino acid deletion, or any combination thereof. In some embodiments, the modified site-directed polypeptide comprises a non-native sequence. In some embodiments, the modified site-directed polypeptide is adapted to target the second nucleic acid-targeting nucleic acid with greater specificity than the wild-type site-directed polypeptide. In some embodiments, the modified site-directed polypeptide is adapted to target the second nucleic acid-targeting nucleic acid with a lower dissociation constant compared to the wild-type site-directed polypeptide. In some embodiments, the modified site-directed polypeptide is adapted to target the second nucleic acid-targeting nucleic acid with a higher dissociation constant compared to the wild-type site-directed polypeptide. In some embodiments, the site-directed polypeptide targets a tracrRNA portion of the second nucleic acid target nucleic acid.

[0046] In one aspect the disclosure provides for a vector comprising a polynucleotide sequence encoding a modified site-directed polypeptide, wherein the polypeptide is modified such that it is adapted to target a second nucleic acid-targeting nucleic acid compared to a wild-type site-directed polypeptide.

[0047] In one aspect the disclosure provides for a kit comprising: a modified site-directed polypeptide, wherein the polypeptide is modified such that it is adapted to target a second nucleic acid-targeting nucleic acid compared to a wild-type site-directed polypeptide, and a buffer. In some embodiments, the kit further comprises instructions for use.

[0048] In one aspect the disclosure provides for a composition comprising: a modified site-directed polypeptide comprising a modification in a bridge helix as compared to SEQ ID: 8. In some embodiments, the composition is configured to cleave a target nucleic acid.

[0049] In one aspect the disclosure provides for a composition comprising: a modified site-directed polypeptide comprising a modification in a highly basic patch as compared to SEQ ID: 8. In some embodiments, the composition is configured to cleave a target nucleic acid.

[0050] In one aspect the disclosure provides for a composition comprising: a modified site-directed polypeptide comprising a modification in a polymerase-like domain as compared to SEQ ID: 8. In some embodiments, the composition is configured to cleave a target nucleic acid.

[0051] In one aspect the disclosure provides for a composition comprising: a modified site-directed polypeptide comprising a modification in a bridge helix, highly basic patch, nuclease domain, and polymerase domain as compared to SEQ ID: 8, or any combination thereof.

[0052] In one aspect the disclosure provides for a vector comprising a polynucleotide sequence encoding a modified site-directed polypeptide comprising a modification in a bridge helix, highly basic patch, nuclease domain, and polymerase domain as compared to SEQ ID: 8, or any combination thereof.

[0053] In one aspect the disclosure provides for a kit comprising: a modified site-directed polypeptide comprising a modification in a bridge helix, highly basic patch, nuclease domain, and polymerase domain as compared to SEQ ID: 8, or any combination thereof, and a buffer. In some embodiments, the kit further comprises instructions for use. In some embodiments, the kit further comprises a nucleic acid-targeting nucleic acid.

[0054] In one aspect the disclosure provides for a genetically modified cell a modified site-directed polypeptide comprising a modification in a bridge helix, highly basic patch, nuclease domain, and polymerase domain as compared to SEQ ID: 8, or any combination thereof.

[0055] In one aspect the disclosure provides for a method for genome engineering comprising: contacting a target nucleic acid with a complex, wherein the complex comprises a modified site-directed polypeptide comprising a modification in a bridge helix, highly basic patch, nuclease domain, and polymerase domain as compared to SEQ ID: 8, or any combination thereof and a nucleic acid-targeting nucleic acid, and modifying the target nucleic acid. In some embodiments, the contacting comprises contacting the complex to a protospacer adjacent motif in the target nucleic acid. In some embodiments, the contacting comprises contacting the complex to a longer target nucleic acid sequence compared to an unmodified site-directed polypeptide. In some embodiments, the modifying comprises cleaving the target nucleic acid. In some embodiments, the target nucleic acid comprises RNA. In some embodiments, the target nucleic acid comprises DNA. In some embodiments, the modifying comprises cleaving the RNA strand of a hybridized RNA and DNA. In some embodiments, the modifying comprises cleaving the DNA strand of a hybridized RNA and DNA. In some embodiments, the modifying comprises inserting into the target nucleic acid a donor polynucleotide, a portion of a donor polynucleotide, a copy of a donor polynucleotide, or a portion of a copy of a donor polynucleotide, or any combination thereof. In some embodiments, the modifying comprises modifying transcriptional activity of the target nucleic acid. In some embodiments, the modifying comprises a deleting of one or more nucleotides of the target nucleic acid.

[0056] In one aspect the disclosure provides for a composition comprising: a modified site-directed polypeptide comprising a modified nuclease domain as compared to SEQ ID: 8. In some embodiments, the composition is configured to cleave a target nucleic acid. In some embodiments, the modified nuclease domain comprises a RuvC domain nuclease domain. In some embodiments, the modified nuclease domain comprises an HNH nuclease domain. In some embodiments, the modified nuclease domain comprises duplication of an HNH nuclease domain. In some embodiments, the modified nuclease domain is adapted to increase specificity of the amino acid sequence for a target nucleic acid compared to an unmodified site-directed polypeptide. In some embodiments, the modified nuclease domain is adapted to increase specificity of the amino acid sequence for a nucleic acid-targeting nucleic acid compared to an unmodified site-directed polypeptide. In some embodiments, the modified nuclease domain comprises a modification selected from the group consisting of: an amino acid addition, an amino acid substitution, an amino acid replacement, and an amino acid deletion, or any combination thereof. In some embodiments, the modified nuclease domain comprises an inserted non-native sequence. In some embodiments, the non-native sequence confers an enzymatic activity to the modified site-directed polypeptide. In some embodiments, the enzymatic activity is selected from the group consisting of: nuclease activity, methylase activity, acetylase activity, demethylase activity, deamination activity, dismutase activity, alkylation activity, depurination activity, oxidation activity, pyrimidine dimer forming activity, integrase activity, transposase activity, recombinase activity, polymerase activity, ligase activity, helicase activity, photolyase activity or glycosylase activity, acetyltransferase activity, deacetylase activity, kinase activity, phosphatase activity, ubiquitin ligase activity, deubiquitinating activity, adenylation activity, deadenylation activity, SUMOylating activity, deSUMOylating activity, ribosylation activity, deribosylation activity, myristoylation activity, remodelling activity, protease activity, oxidoreductase activity, transferase activity, hydrolase activity, lyase activity, isomerase activity, synthase activity, synthetase activity, and demyristoylation activity, or any combination thereof. In some embodiments, the enzymatic activity is adapted to modulate transcription of a target nucleic acid. In some embodiments, the modified nuclease domain is adapted to allow binding of the amino acid sequence to a protospacer adjacent motif sequence that is different from a protospacer adjacent motif sequence to which an unmodified site-directed polypeptide is adapted to bind. In some embodiments, the modified nuclease domain is adapted to allow binding of the amino acid sequence to a nucleic acid-targeting nucleic acid that is different from a nucleic acid-targeting nucleic acid to which an unmodified site-directed polypeptide is adapted to bind. In some embodiments, the modified site-directed polypeptide is adapted to bind to a longer target nucleic acid sequence than an unmodified site-directed polypeptide. In some embodiments, the modified site-directed polypeptide is adapted to cleave double-stranded DNA. In some embodiments, the modified site-directed polypeptide is adapted to cleave the RNA strand of a hybridized RNA and DNA. In some embodiments, the modified site-directed polypeptide is adapted to cleave the DNA strand of a hybridized RNA and DNA. In some embodiments, the composition further comprises a modified nucleic acid-targeting nucleic acid, wherein the modification of the site-directed polypeptide is adapted to enable the site-directed polypeptide to bind to the modified nucleic acid-targeting nucleic acid. In some embodiments, the modified nucleic acid-targeting nucleic acid and the modified site-directed polypeptide comprise compensatory mutations.

[0057] In one aspect the disclosure provides for a method for enriching a target nucleic acid for sequencing comprising: contacting a target nucleic acid with a complex comprising a nucleic acid-targeting nucleic acid and a site-directed polypeptide, enriching the target nucleic acid using the complex, and determining a sequence of the target nucleic acid. In some embodiments, the method does not comprise an amplification step. In some embodiments, the method further comprises analyzing the sequence of the target nucleic acid. In some embodiments, the method further comprises fragmenting the target nucleic acid prior to the enriching. In some embodiments, the nucleic acid-targeting nucleic acid comprises RNA. In some embodiments, the method the nucleic acid-targeting nucleic acid comprises two RNA molecules. In some embodiments, the method a portion of each of the two RNA molecules hybridize together. In some embodiments, the method one of the two RNA molecules comprises a CRISPR repeat sequence. In some embodiments, the CRISPR repeat sequence is homologous to a crRNA over 6 contiguous nucleotides. In some embodiments, the CRISPR repeat sequence comprises at least 60% identity to a crRNA over 6 contiguous nucleotides. In some embodiments, the one of the two RNA molecules comprises a tracrRNA sequence. In some embodiments, the tracRNA sequence is homologous to a tracrRNA over 6 contiguous nucleotides. In some embodiments, the tracRNA sequence comprises at least 60% identity to a tracrRNA over 6 contiguous nucleotides. In some embodiments, the nucleic acid-targeting nucleic acid is a double guide nucleic acid. In some embodiments, the nucleic acid-targeting nucleic acid comprises one continuous RNA molecule wherein the continuous RNA molecule further comprises two domains and a linker. In some embodiments, a portion of each of the two domains of the continuous RNA molecule hybridize together. In some embodiments, the continuous RNA molecule comprises a CRISPR repeat sequence. In some embodiments, the CRISPR repeat sequence is homologous to a crRNA over 6 contiguous nucleotides. In some embodiments, the CRISPR repeat sequence comprises at least 60% identity to a crRNA over 6 contiguous nucleotides. In some embodiments, the continuous RNA molecule comprises a tracrRNA sequence. In some embodiments, the tracRNA sequence is homologous to a tracrRNA over 6 contiguous nucleotides. In some embodiments, the tracRNA sequence comprises at least 60% identity to a tracrRNA over 6 contiguous nucleotides. In some embodiments, the nucleic acid-targeting nucleic acid is a single guide nucleic acid. In some embodiments, the contacting comprises hybridizing a portion of the nucleic acid-targeting nucleic acid with a portion of the target nucleic acid. In some embodiments, the nucleic acid-targeting nucleic acid hybridizes with the target nucleic acid over a region comprising 6-20 nucleotides. In some embodiments, the site-directed polypeptide comprises Cas9. In some embodiments, the site-directed polypeptide comprises at least 20% homology to a nuclease domain of Cas9. In some embodiments, the site-directed polypeptide comprises at least 60% homology to Cas9. In some embodiments, the site-directed polypeptide comprises an engineered nuclease domain wherein the nuclease domain comprises reduced nuclease activity compared to a site-directed polypeptide that comprises an unengineered nuclease domain. In some embodiments, the site-directed polypeptide introduces a single-strand break in the target nucleic acid. In some embodiments, the engineered nuclease domain comprises mutation of a conserved aspartic acid. In some embodiments, the engineered nuclease domain comprises a D10A mutation. In some embodiments, the engineered nuclease domain comprises mutation of a conserved histidine. In some embodiments, the engineered nuclease domain comprises a H840A mutation. In some embodiments, the site-directed polypeptide comprises an affinity tag. In some embodiments, the affinity tag is located at the N-terminus of the site-directed polypeptide, the C-terminus of the site-directed polypeptide, a surface-accessible region, or any combination thereof. In some embodiments, the affinity tag is selected from a group comprising: biotin, FLAG, His6×(SEQ ID NO: 1360), His9×(SEQ ID NO: 1361), and a fluorescent protein, or any combination thereof. In some embodiments, the nucleic acid-targeting nucleic acid comprises a nucleic acid affinity tag. In some embodiments, the nucleic acid affinity tag is located at the 5′ end of the nucleic acid-targeting nucleic acid, the 3′ end of the nucleic acid-targeting nucleic acid, a surface-accessible region, or any combination thereof. In some embodiments, the nucleic acid affinity tag is selected from the group comprising a small molecule, fluorescent label, a radioactive label, or any combination thereof. In some embodiments, the nucleic acid affinity tag comprises a sequence that is configured to bind to Csy4, Cas5, Cas6, or any combination thereof. In some embodiments, the nucleic acid affinity tag comprises 50% identity to 5′-GUUCACUGCCGUAUAGGCAGCUAAGAAA-3′ (SEQ ID NO: 1347). In some embodiments, the method further comprises diagnosing a disease and making a patient-specific treatment decision, or any combination thereof. In some embodiments, the determining comprises determining a genotype. In some embodiments, the method further comprises communicating the sequence from a storage memory system to a remote computer. In some embodiments, the enriching comprises contacting an affinity tag of the complex with a capture agent. In some embodiments, the capture agent comprises an antibody. In some embodiments, the capture agent comprises a solid support. In some embodiments, the capture agent is selected from the group comprising: Csy4, Cas5, and Cas6. In some embodiments, the capture agent comprises reduced enzymatic activity in the absence of imidazole. In some embodiments, the capture agent comprises an activatable enzymatic domain, wherein the activatable enzymatic domain is activated by coming in contact with imidazole. In some embodiments, the capture agent is a Cas6 family member. In some embodiments, the capture agent comprises an affinity tag. In some embodiments, the capture agent comprises a conditionally enzymatically inactive endoribonuclease comprising a mutation in a nuclease domain. In some embodiments, the mutation is a conserved histidine. In some embodiments, the mutation comprises a H29A mutation. In some embodiments, the target nucleic acid is bound to the complex. In some embodiments, the target nucleic acid is an excised nucleic acid that is not bound to the complex. In some embodiments, a plurality of complexes are contacted to a plurality of target nucleic acids. In some embodiments, the plurality of target nucleic acids differ by at least one nucleotide. In some embodiments, the plurality of complexes comprise a plurality of nucleic acid-targeting nucleic acids that differ by at least one nucleotide.

[0058] In one aspect the disclosure provides for a method for excising a nucleic acid comprising: contacting a target nucleic acid with two or more complexes, wherein each complex comprises a site-directed polypeptide and a nucleic acid-targeting nucleic acid, and cleaving the target nucleic acid, wherein the cleaving produces an excised target nucleic acid. In some embodiments, the cleaving is performed by a nuclease domain of the site-directed polypeptide. In some embodiments, the method does not comprise amplification. In some embodiments, the method further comprises enriching the excised target nucleic acid. In some embodiments, the method further comprises sequencing the excised target nucleic acid. In some embodiments, the nucleic acid-targeting nucleic acid is RNA. In some embodiments, the nucleic acid-targeting nucleic acid comprises two RNA molecules. In some embodiments, a portion of each of the two RNA molecules hybridize together. In some embodiments, one of the two RNA molecules comprises a CRISPR repeat sequence. In some embodiments, the CRISPR repeat sequence comprises a sequence that is homologous to a crRNA over 6 contiguous nucleotides. In some embodiments, the CRISPR repeat sequence comprises a sequence that has at least 60% identity to a crRNA over 6 contiguous nucleotides. In some embodiments, one of the two RNA molecules comprises a tracrRNA sequence. In some embodiments, the tracRNA sequence is homologous to a crRNA over 6 contiguous nucleotides. In some embodiments, the tracRNA sequence comprises at least 60% identity to a crRNA over 6 contiguous nucleotides. In some embodiments, the nucleic acid-targeting nucleic acid is a double guide nucleic acid. In some embodiments, the nucleic acid-targeting nucleic acid comprises one continuous RNA molecule wherein the continuous RNA molecule further comprises two domains and a linker. In some embodiments, a portion of each of the two domains of the continuous RNA molecule hybridize together. In some embodiments, the continuous RNA molecule comprises a CRISPR repeat sequence. In some embodiments, the CRISPR repeat sequence is homologous to a crRNA over 6 contiguous nucleotides. In some embodiments, the CRISPR repeat sequence comprises at least 60% identity to a crRNA over 6 contiguous nucleotides. In some embodiments, the continuous RNA molecule comprises a tracrRNA sequence. In some embodiments, the tracRNA sequence is homologous to a crRNA over 6 contiguous nucleotides. In some embodiments, the tracRNA sequence comprises at least 60% identity to a crRNA over 6 contiguous nucleotides. In some embodiments, the nucleic acid-targeting nucleic acid is a single guide nucleic acid. In some embodiments, the nucleic acid-targeting nucleic acid hybridizes with a target nucleic acid. In some embodiments, the nucleic acid-targeting nucleic acid hybridizes with a target nucleic acid over a region, wherein the region comprises at least 6 nucleotides and at most 20 nucleotides. In some embodiments, the site-directed polypeptide is Cas9. In some embodiments, the site-directed polypeptide comprises a polypeptide comprising at least 20% homology to a nuclease domain of Cas9. In some embodiments, the site-directed polypeptide comprises a polypeptide comprising at least 60% homology to Cas9. In some embodiments, the site-directed polypeptide comprises an affinity tag. In some embodiments, the affinity tag is located at the N-terminus of the site-directed polypeptide, the C-terminus of the site-directed polypeptide, a surface-accessible region, or any combination thereof. In some embodiments, the affinity tag is selected from a group comprising: biotin, FLAG, His6×(SEQ ID NO: 1360), His9×(SEQ ID NO: 1361), and a fluorescent protein, or any combination thereof. In some embodiments, the nucleic acid-targeting nucleic acid comprises a nucleic acid affinity tag. In some embodiments, the nucleic acid affinity tag is located at the 5′ end of the nucleic acid-targeting nucleic acid, the 3′ end of the nucleic acid-targeting nucleic acid, a surface-accessible region, or any combination thereof. In some embodiments, the nucleic acid affinity tag is selected from the group comprising a small molecule, fluorescent label, a radioactive label, or any combination thereof. In some embodiments, the nucleic acid affinity tag is a sequence that can bind to Csy4, Cas5, Cas6, or any combination thereof. In some embodiments, the nucleic acid affinity tag comprises 50% identity to GUUCACUGCCGUAUAGGCAGCUAAGAAA (SEQ ID NO: 1347). In some embodiments, the target nucleic acid is an excised nucleic acid that is not bound to the two or more complexes. In some embodiments, the two or more complexes are contacted to a plurality of target nucleic acids. In some embodiments, the plurality of target nucleic acids differ by at least one nucleotide. In some embodiments, the two or more complexes comprise nucleic acid-targeting nucleic acids that differ by at least one nucleotide.

[0059] In one aspect the disclosure provides for a method for generating a library of target nucleic acids comprising: contacting a plurality of target nucleic acids with a complex comprising a site-directed polypeptide and a nucleic acid-targeting nucleic acid, cleaving the plurality of target nucleic acids, and purifying the plurality of target nucleic acids to create the library of target nucleic acids. In some embodiments, the method further comprises screening the library of target nucleic acids.

[0060] In one aspect the disclosure provides for a composition comprising: a first complex comprising: a first site-directed polypeptide and a first nucleic acid-targeting nucleic acid, a second complex comprising: a second site-directed polypeptide and a second nucleic acid-targeting nucleic acid, wherein, the first and second nucleic acid-targeting nucleic acids are different. In some embodiments, the composition further comprises a target nucleic acid, which is bound by the first or the second complex. In some embodiments, the first site-directed polypeptide and the second site-directed polypeptide are the same. In some embodiments, the first site-directed polypeptide and the second site-directed polypeptide are different.

[0061] In one aspect the disclosure provides for a vector comprising a polynucleotide sequence encoding: two or more nucleic acid-targeting nucleic acids that differ by at least one nucleotide, and a site-directed polypeptide.

[0062] In one aspect the disclosure provides a genetically modified host cell comprising: a vector comprising a polynucleotide sequence encoding: two or more nucleic acid-targeting nucleic acids that differ by at least one nucleotide, and a site-directed polypeptide.

[0063] In one aspect the disclosure provides a kit comprising: a vector comprising a polynucleotide sequence encoding: two or more nucleic acid-targeting nucleic acids that differ by at least one nucleotide, a site-directed polypeptide, and a suitable buffer. In some embodiments, the kit further comprises: a capture agent, a solid support, sequencing adaptors, and a positive control, or any combination thereof. In some embodiments, the kit further comprises instructions for use.

[0064] In one aspect the disclosure provides for a kit comprising: a site-directed polypeptide comprising reduced enzymatic activity compared to a wild-type site-directed polypeptide, a nucleic acid-targeting nucleic acid, and a capture agent. In some embodiments, the kit further comprises: instructions for use. In some embodiments, the kit further comprises a buffer selected from the group comprising: a wash buffer, a stabilization buffer, a reconstituting buffer, or a diluting buffer.

[0065] In one aspect the disclosure provides for a method for cleaving a target nucleic acid using two or more nickases comprising: contacting a target nucleic acid with a first complex and a second complex, wherein the first complex comprises a first nickase and a first nucleic acid-targeting nucleic acid, and wherein the second complex comprises a second nickase and a second nucleic acid-targeting nucleic acid, wherein the target nucleic acid comprises a first protospacer adjacent motif on a first strand and a second protospacer adjacent motif on a second strand, wherein the first nucleic acid-targeting nucleic acids is adapted to hybridize to the first protospacer adjacent motif, and wherein the second nucleic acid-targeting nucleic acid is adapted to hybridize to the second protospacer adjacent motif, and nicking the first and second strands of the target nucleic acid, wherein the nicking generates a cleaved target nucleic acid. In some embodiments, the first and second nickase are the same. In some embodiments, the first and second nickase are different. In some embodiments, the first and second nucleic acid-targeting nucleic acid are different. In some embodiments, there are less than 125 nucleotides between the first protospacer adjacent motif and the second protospacer adjacent motif. In some embodiments, the first and second protospacer adjacent motifs comprise of the sequence NGG, where N is any nucleotide. In some embodiments, the first or second nickase comprises at least one substantially inactive nuclease domain. In some embodiments, the first or second nickase comprises a mutation of a conserved aspartic acid. In some embodiments, the mutation is a D10A mutation. In some embodiments, the first or second nickase comprises a mutation of a conserved histidine. In some embodiments, the mutation is a H840A mutation. In some embodiments, there are less than 15 nucleotides between the first and second protospacer adjacent motifs. In some embodiments, there are less than 10 nucleotides between the first and second protospacer adjacent motifs. In some embodiments, there are less than 5 nucleotides between the first and second protospacer adjacent motifs. In some embodiments, the first and second protospacer adjacent motifs are adjacent to one another. In some embodiments, the nicking comprises the first nickase nicking the first strand and the second nickase nicking the second strand. In some embodiments, the nicking generates a sticky end cut. In some embodiments, the nicking generates a blunt end cut. In some embodiments, the method further comprises inserting a donor polynucleotide into the cleaved target nucleic acid.

[0066] In one aspect the disclosure provides for a composition comprising: a plurality of nucleic acid molecules, wherein each nucleic acid molecule comprises a nucleic acid-binding protein binding site, wherein at least one of the plurality of nucleic acid molecules encodes for a nucleic acid-targeting nucleic acid and one of the plurality of nucleic acid molecules encodes for a site-directed polypeptide, and a fusion polypeptide, wherein the fusion polypeptide comprises a plurality of the nucleic acid-binding proteins, wherein the plurality of nucleic acid-binding proteins are adapted to bind to their cognate nucleic acid-binding protein binding site. In some embodiments, one or more of the plurality of nucleic acid-binding proteins comprise a non-native sequence. In some embodiments, the non-native sequence is located at a position selected from the group consisting of: the N-terminus, the C-terminus, a surface accessible region, or any combination thereof. In some embodiments, the non-native sequence encodes for a nuclear localization signal. In some embodiments, the plurality of nucleic acid-binding proteins are separated by a linker. In some embodiments, some of the plurality of nucleic acid-binding proteins are the same nucleic acid-binding protein. In some embodiments, all of the plurality of nucleic acid-binding proteins are the same nucleic acid-binding protein. In some embodiments, the plurality of nucleic acid-binding proteins are different nucleic acid-binding proteins. In some embodiments, the plurality of nucleic acid-binding proteins comprise RNA-binding proteins. In some embodiments, the RNA-binding proteins are selected from the group consisting of: a Type I Clustered Regularly Interspaced Short Palindromic Repeat system endoribonuclease, a Type II Clustered Regularly Interspaced Short Palindromic Repeat system endoribonuclease, or a Type III Clustered Regularly Interspaced Short Palindromic Repeat system endoribonuclease, or any combination thereof. In some embodiments, the RNA-binding proteins are selected from the group consisting of: Cas5, Cas6, and Csy4, or any combination thereof. In some embodiments, the plurality of nucleic acid-binding proteins comprise DNA-binding proteins. In some embodiments, the nucleic acid-binding protein binding site is configured to bind a nucleic acid-binding protein selected from the group consisting of: Type I, Type II, and Type III Clustered Regularly Interspaced Short Palindromic Repeat system nucleic acid-binding protein, or any combination thereof. In some embodiments, the nucleic acid-binding protein binding site is configured to bind a nucleic acid-binding protein selected from the group consisting of: Cas6, Cas5, and Csy4, or any combination thereof. In some embodiments, some of the plurality of nucleic acid molecules comprise the same nucleic acid-binding protein binding site. In some embodiments, the plurality of nucleic acid molecules comprise the same nucleic acid-binding protein binding site. In some embodiments, the none of the plurality of nucleic acid molecules comprise the same nucleic acid-binding protein binding site. In some embodiments, the site-directed polypeptide comprises at least 20% sequence identity to a nuclease domain of Cas9. In some embodiments, the site-directed polypeptide is Cas9. In some embodiments, at least one of the nucleic acid molecules encodes for a Clustered Regularly Interspaced Short Palindromic Repeat endoribonuclease. In some embodiments, the Clustered Regularly Interspaced Short Palindromic Repeat endoribonuclease comprises at least 20% sequence similarity to Csy4. In some embodiments, the Clustered Regularly Interspaced Short Palindromic Repeat endoribonuclease comprises at least 60% sequence similarity to Csy4. In some embodiments, the Clustered Regularly Interspaced Short Palindromic Repeat endoribonuclease is Csy4. In some embodiments, the plurality of nucleic acid-binding proteins comprise reduced enzymatic activity. In some embodiments, the plurality of nucleic acid-binding proteins are adapted to bind to the nucleic acid-binding protein binding site but cannot cleave the nucleic acid-binding protein binding site. In some embodiments, the nucleic acid-targeting nucleic acid comprises two RNA molecules. In some embodiments, a portion of each of the two RNA molecules hybridize together. In some embodiments, a first molecule of the two RNA molecules comprises a sequence comprising at least 60% identity to a Clustered Regularly Interspaced Short Palindromic Repeat RNA sequence over 8 contiguous nucleotides, and wherein a second molecule of the two RNA molecules comprises a sequence comprising at least 60% identity to a trans-activating-Clustered Regularly Interspaced Short Palindromic Repeat RNA sequence over 6 contiguous nucleotides. In some embodiments, the nucleic acid-targeting nucleic acid comprises one continuous RNA molecule wherein the continuous RNA molecule further comprises two domains and a linker. In some embodiments, a portion of the two domains of the continuous RNA molecule hybridize together. In some embodiments, a first portion of the continuous RNA molecule comprises a sequence comprising at least 60% identity to a Clustered Regularly Interspaced Short Palindromic Repeat RNA sequence over 8 contiguous nucleotides, and wherein a second portion of the continuous RNA molecule comprises a sequence comprising at least 60% identity to a trans-activating-Clustered Regularly Interspaced Short Palindromic Repeat RNA sequence over 6 contiguous nucleotides. In some embodiments, the nucleic acid targeting nucleic acid is adapted to hybridize with a target nucleic acid over 6-20 nucleotides. In some embodiments, the composition is configured to be delivered to a cell. In some embodiments, the composition is configured to deliver equal amounts of the plurality of nucleic acid molecules to a cell. In some embodiments, the composition further comprises a donor polynucleotide molecule, wherein the donor polynucleotide molecule comprises a nucleic acid-binding protein binding site, wherein the binding site is bound by a nucleic acid-binding protein of the fusion polypeptide.

[0067] In one aspect the disclosure provides for a method for delivery of nucleic acids to a subcellular location in a cell comprising: introducing into a cell a composition comprising: a plurality of nucleic acid molecules, wherein each nucleic acid molecule comprises a nucleic acid-binding protein binding site, wherein at least one of the plurality of nucleic acid molecules encodes for a nucleic acid-targeting nucleic acid and one of the plurality of nucleic acid molecules encodes for a site-directed polypeptide, and a fusion polypeptide, wherein the fusion polypeptide comprises a plurality of the nucleic acid-binding proteins, wherein the plurality of nucleic acid-binding proteins are adapted to bind to their cognate nucleic acid-binding protein binding site stoichiometrically delivering the composition to the subcellular location, forming a unit comprising a site-directed polypeptide translated from the nucleic acid molecule encoding for a site-directed polypeptide and the nucleic acid-targeting nucleic acid, and cleaving a target nucleic acid, wherein the site-directed polypeptide of the unit cleaves the target nucleic acid. In some embodiments, the plurality of nucleic acid-binding proteins bind to their cognate nucleic acid-binding protein binding site. In some embodiments, an endoribonuclease cleaves one of the one or more nucleic acid-binding protein binding sites. In some embodiments, an endoribonuclease cleaves the nucleic acid-binding protein binding sites of the nucleic acid encoding the nucleic acid-targeting nucleic acid, thereby liberating the nucleic acid-targeting nucleic acid. In some embodiments, the subcellular location is selected from the group consisting of: the nuclease, the ER, the golgi, the mitochondria, the cell wall, the lysosome, and the nucleus. In some embodiments, the subcellular location is the nucleus.

[0068] In one aspect the disclosure provides for a vector comprising: a polynucleotide sequence encoding a composition comprising: a plurality of nucleic acid molecules, wherein each nucleic acid molecule comprises a nucleic acid-binding protein binding site, wherein at least one of the plurality of nucleic acid molecules encodes for a nucleic acid-targeting nucleic acid and one of the plurality of nucleic acid molecules encodes for a site-directed polypeptide; and a fusion polypeptide, wherein the fusion polypeptide comprises a plurality of the nucleic acid-binding proteins, wherein the plurality of nucleic acid-binding proteins are adapted to bind to their cognate nucleic acid-binding protein binding site stoichiometrically delivering the composition to the subcellular location. In some embodiments, the vector further comprises a polynucleotide encoding a promoter. In some embodiments, the promoter is operably linked to the polynucleotide. In some embodiments, the promoter is an inducible promoter.

[0069] In one aspect the disclosure provides for a genetically modified organism comprising a vector comprising: a polynucleotide sequence encoding for a plurality of nucleic acid molecules, wherein each nucleic acid molecule comprises a nucleic acid-binding protein binding site, wherein at least one of the plurality of nucleic acid molecules encodes for a nucleic acid-targeting nucleic acid and one of the plurality of nucleic acid molecules encodes for a site-directed polypeptide, and a fusion polypeptide, wherein the fusion polypeptide comprises a plurality of the nucleic acid-binding proteins, wherein the plurality of nucleic acid-binding proteins are adapted to bind to their cognate nucleic acid-binding protein binding site stoichiometrically delivering the composition to the subcellular location.

[0070] In one aspect the disclosure provides for a genetically modified organism comprising: a composition comprising: a plurality of nucleic acid molecules, wherein each nucleic acid molecule comprises a nucleic acid-binding protein binding site, wherein at least one of the plurality of nucleic acid molecules encodes for a nucleic acid-targeting nucleic acid and one of the plurality of nucleic acid molecules encodes for a site-directed polypeptide; and a fusion polypeptide, wherein the fusion polypeptide comprises a plurality of the nucleic acid-binding proteins, wherein the plurality of nucleic acid-binding proteins are adapted to bind to their cognate nucleic acid-binding protein binding site.

[0071] In one aspect the disclosure provides for a kit comprising: a composition comprising: a plurality of nucleic acid molecules, wherein each nucleic acid molecule comprises a nucleic acid-binding protein binding site, wherein at least one of the plurality of nucleic acid molecules encodes for a nucleic acid-targeting nucleic acid and one of the plurality of nucleic acid molecules encodes for a site-directed polypeptide, and a fusion polypeptide, wherein the fusion polypeptide comprises a plurality of the nucleic acid-binding proteins, wherein the plurality of nucleic acid-binding proteins are adapted to bind to their cognate nucleic acid-binding protein binding site, and a buffer.

[0072] In one aspect the disclosure provides for a kit comprising: a vector comprising: a polynucleotide sequence encoding for a plurality of nucleic acid molecules, wherein each nucleic acid molecule comprises a nucleic acid-binding protein binding site, wherein at least one of the plurality of nucleic acid molecules encodes for a nucleic acid-targeting nucleic acid and one of the plurality of nucleic acid molecules encodes for a site-directed polypeptide; and a fusion polypeptide, wherein the fusion polypeptide comprises a plurality of the nucleic acid-binding proteins, wherein the plurality of nucleic acid-binding proteins are adapted to bind to their cognate nucleic acid-binding protein binding site stoichiometrically delivering the composition to the subcellular location, and a buffer. In some embodiments, the kit further comprises instructions for use. In some embodiments, the buffer is selected from the group comprising: a dilution buffer, a reconstitution buffer, and a stabilization buffer, or any combination thereof.

[0073] In one aspect the disclosure provides for a donor polynucleotide comprising: a genetic element of interest, and a reporter element, wherein the reporter element comprises a polynucleotide sequence encoding a site-directed polypeptide, and one or more a nucleic acids, wherein the one or more nucleic acids comprises a sequence comprising at least 50% sequence identity to a crRNA over 6 contiguous nucleotides and a sequence comprising at least 50% sequence identity to a tracrRNA over 6 contiguous nucleotides. In some embodiments, the genetic element of interest comprises a gene. In some embodiments, the genetic element of interest comprises a non-coding nucleic acid selected from the group consisting of: a microRNA, a siRNA, and a long non-coding RNA, or any combination thereof. In some embodiments, the genetic element of interest comprises a non-coding gene. In some embodiments, the genetic element of interest comprises a non-coding nucleic acid selected from the group consisting of: a microRNA, a siRNA, and a long non-coding RNA, or any combination thereof. In some embodiments, the reporter element comprises a gene selected from the group consisting of: a gene encoding a fluorescent protein, a gene encoding a chemiluminescent protein, and an antibiotic resistance gene, or any combination thereof. In some embodiments, the reporter element comprises a gene encoding a fluorescent protein. In some embodiments, the fluorescent protein comprises green fluorescent protein. In some embodiments, the reporter element is operably linked to a promoter. In some embodiments, the promoter comprises an inducible promoter. In some embodiments, the promoter comprises a tissue-specific promoter. In some embodiments, the site-directed polypeptide comprises at least 15% amino acid sequence identity to a nuclease domain of Cas9. In some embodiments, the site-directed polypeptide comprises at least 95% amino acid sequence identity over 10 amino acids to Cas9. In some embodiments, the nuclease domain is selected from the group consisting of: an HNH domain, an HNH-like domain, a RuvC domain, and a RuvC-like domain, or any combination thereof.

[0074] In one aspect the disclosure provides for an expression vector comprising a polynucleotide sequence encoding for a genetic element of interest; and a reporter element, wherein the reporter element comprises a polynucleotide sequence encoding a site-directed polypeptide, and one or more a nucleic acids, wherein the one or more nucleic acids comprises a sequence comprising at least 50% sequence identity to a crRNA over 6 contiguous nucleotides and a sequence comprising at least 50% sequence identity to a tracrRNA over 6 contiguous nucleotides.

[0075] In one aspect the disclosure provides for a genetically modified cell comprising a donor polynucleotide comprising: a genetic element of interest; and a reporter element, wherein the reporter element comprises a polynucleotide sequence encoding a site-directed polypeptide, and one or more a nucleic acids, wherein the one or more nucleic acids comprises a sequence comprising at least 50% sequence identity to a crRNA over 6 contiguous nucleotides and a sequence comprising at least 50% sequence identity to a tracrRNA over 6 contiguous nucleotides.

[0076] In one aspect the disclosure provides for a kit comprising: a donor polynucleotide comprising: a genetic element of interest; and a reporter element, wherein the reporter element comprises a polynucleotide sequence encoding a site-directed polypeptide, and one or more a nucleic acids, wherein the one or more nucleic acids comprises a sequence comprising at least 50% sequence identity to a crRNA over 6 contiguous nucleotides and a sequence comprising at least 50% sequence identity to a tracrRNA over 6 contiguous nucleotides; and a buffer. In some embodiments, the kit further comprises: a polypeptide comprising at least 10% amino acid sequence identity to Cas9; and a nucleic acid, wherein the nucleic acid binds to the polypeptide and hybridizes to a target nucleic acid. In some embodiments, the kit further comprises instructions for use. In some embodiments, the kit further comprises a polynucleotide encoding a polypeptide, wherein the polypeptide comprises at last 15% amino acid sequence identity to Cas9. In some embodiments, the kit further comprises a polynucleotide encoding a nucleic acid, wherein the nucleic acid comprises a sequence comprising at least 50% sequence identity to a crRNA over 6 contiguous nucleotides and a sequence comprising at least 50% sequence identity to a tracrRNA over 6 contiguous nucleotides.

[0077] In one aspect the disclosure provides for a method for selecting a cell using a reporter element and excising the reporter element from the cell comprising: contacting a target nucleic acid with a complex comprising a site-directed polypeptide and a nucleic acid-targeting nucleic acid; cleaving the target nucleic acid with the site-directed polypeptide, to generate a cleaved target nucleic acid; inserting the donor polynucleotide comprising a genetic element of interest; and a reporter element, wherein the reporter element comprises a polynucleotide sequence encoding a site-directed polypeptide, and one or more a nucleic acids, wherein the one or more nucleic acids comprises a sequence comprising at least 50% sequence identity to a crRNA over 6 contiguous nucleotides and a sequence comprising at least 50% sequence identity to a tracrRNA over 6 contiguous nucleotides into the cleaved target nucleic acid; and selecting the cell based on the donor polynucleotide to generate a selected cell. In some embodiments, selecting comprises selecting the cell from a subject being treated for a disease. In some embodiments, selecting comprises selecting the cell from a subject being diagnosed for a disease. In some embodiments, after the selecting, the cell comprises the donor polynucleotide. In some embodiments, the method further comprises excising all, some or none of the reporter element, thereby generating a second selected cell. In some embodiments, excising comprises contacting the 5′ end of the reporter element with a complex comprising a site-directed polypeptide and a nucleic acid-targeting nucleic acid, wherein the complex cleaves the 5′-end. In some embodiments, excising comprises contacting the 3′ end of the reporter element with a complex comprising a site-directed polypeptide and a nucleic acid-targeting nucleic acid, wherein the complex cleaves the 3′ end. In some embodiments, excising comprises contacting the 5′ and 3′ end of the reporter element with one or more complexes comprising a site-directed polypeptide and a nucleic acid-targeting nucleic acid, wherein the complex cleaves the 5′ and 3′ end. In some embodiments, the method further comprises screening the second selected cell. In some embodiments, screening comprises observing an absence of all or some of the reporter element.

[0078] In one aspect the disclosure provides for a composition comprising: a nucleic acid comprising: a spacer, wherein the spacer is between 12-30 nucleotides, inclusive, and wherein the spacer is adapted to hybridize to a sequence that is 5′ to a PAM; a first duplex, wherein the first duplex is 3′ to the spacer; a bulge, wherein the bulge comprises at least 3 unpaired nucleotides on a first strand of the first duplex and at least 1 unpaired nucleotide on a second strand of the first duplex; a linker, wherein the linker links the first strand and the second strand of the duplex and is at least 3 nucleotides in length; a P-domain; and a second duplex, wherein the second duplex is 3′ of the P-domain and is adapted to bind to a site directed polypeptide. In some embodiments, the sequence that is 5′ to a PAM is at least 18 nucleotides in length. In some embodiments, the sequence that is 5′ to a PAM is adjacent to the PAM. In some embodiments, the PAM comprises 5′-NGG-3′. In some embodiments, the first duplex is adjacent to the spacer. In some embodiments, the P-domain starts from 1-5 nucleotides downstream of the duplex, comprises at least 4 nucleotides, and is adapted to hybridize to sequence selected from the group consisting of: a 5′-NGG-3′ protospacer adjacent motif sequence, a sequence comprising at least 50% identity to amino acids 1096-1225 of Cas9 from S. pyogenes, or any combination thereof. In some embodiments, the site-directed polypeptide comprises at least 15% identity to a nuclease domain of Cas9 from S. pyogenes. In some embodiments, the nucleic acid is RNA. In some embodiments, the nucleic acid is an A-form RNA. In some embodiments, the first duplex is at least 6 nucleotides in length. In some embodiments, the 3 unpaired nucleotides of the bulge comprise 5′-AAG-3′. In some embodiments, adjacent to the 3 unpaired nucleotides is a nucleotide that forms a wobble pair with a nucleotide on the second strand of the first duplex. In some embodiments, the polypeptide binds to a region of the nucleic acid selected from the group consisting of: the first duplex, the second duplex, and the P-domain, or any combination thereof.

[0079] In one aspect the disclosure provides for a method of modifying a target nucleic acid comprising: contacting a target nucleic acid with a composition comprising: a nucleic acid comprising: a spacer, wherein the spacer is between 12-30 nucleotides, inclusive, and wherein the spacer is adapted to hybridize to a sequence that is 5′ to a PAM; a first duplex, wherein the first duplex is 3′ to the spacer; a bulge, wherein the bulge comprises at least 3 unpaired nucleotides on a first strand of the first duplex and at least 1 unpaired nucleotide on a second strand of the first duplex; a linker, wherein the linker links the first strand and the second strand of the duplex and is at least 3 nucleotides in length; a P-domain; and a second duplex, wherein the second duplex is 3′ of the P-domain and is adapted to bind to a site directed polypeptide; and modifying the target nucleic acid. In some embodiments, the method further comprises contacting with a site-directed polypeptide. In some embodiments, the contacting comprises contacting the spacer to the target nucleic acid. In some embodiments, the modifying comprises cleaving the target nucleic acid to produce a cleaved target nucleic acid. In some embodiments, the cleaving is performed by the site-directed polypeptide. In some embodiments, the method further comprises inserting a donor polynucleotide into the cleaved target nucleic acid. In some embodiments, the modifying comprises modifying transcription of the target nucleic acid.

[0080] In one aspect the disclosure provides for a vector comprising a polynucleotide sequence encoding a nucleic acid comprising: a spacer, wherein the spacer is between 12-30 nucleotides, inclusive, and wherein the spacer is adapted to hybridize to a sequence that is 5′ to a PAM; a first duplex, wherein the first duplex is 3′ to the spacer; a bulge, wherein the bulge comprises at least 3 unpaired nucleotides on a first strand of the first duplex and at least 1 unpaired nucleotide on a second strand of the first duplex; a linker, wherein the linker links the first strand and the second strand of the duplex and is at least 3 nucleotides in length; a P-domain; and a second duplex, wherein the second duplex is 3′ of the P-domain and is adapted to bind to a site directed polypeptide.

[0081] In one aspect the disclosure provides for a kit comprising: a composition comprising: a nucleic acid comprising: a spacer, wherein the spacer is between 12-30 nucleotides, inclusive, and wherein the spacer is adapted to hybridize to a sequence that is 5′ to a PAM; a first duplex, wherein the first duplex is 3′ to the spacer; a bulge, wherein the bulge comprises at least 3 unpaired nucleotides on a first strand of the first duplex and at least 1 unpaired nucleotide on a second strand of the first duplex; a linker, wherein the linker links the first strand and the second strand of the duplex and is at least 3 nucleotides in length; a P-domain; and a second duplex, wherein the second duplex is 3′ of the P-domain and is adapted to bind to a site directed polypeptide; and a buffer. In some embodiments, the kit further comprises a site-directed polypeptide. In some embodiments, the kit further comprises a donor polynucleotide. In some embodiments, the kit further comprises instructions for use.

[0082] In one aspect, the disclosure provides for a method of creating a synthetically designed nucleic acid-targeting nucleic acid comprising: designing a composition comprising: a nucleic acid comprising: a spacer, wherein the spacer is between 12-30 nucleotides, inclusive, and wherein the spacer is adapted to hybridize to a sequence that is 5′ to a PAM; a first duplex, wherein the first duplex is 3′ to the spacer; a bulge, wherein the bulge comprises at least 3 unpaired nucleotides on a first strand of the first duplex and at least 1 unpaired nucleotide on a second strand of the first duplex; a linker, wherein the linker links the first strand and the second strand of the duplex and is at least 3 nucleotides in length; a P-domain; and a second duplex, wherein the second duplex is 3′ of the P-domain and is adapted to bind to a site directed polypeptide.

[0083] In one aspect, the disclosure provides for a pharmaceutical composition comprising an engineered nucleic acid-targeting nucleic acid selected from the group consisting of: an engineered nucleic acid-targeting nucleic acid comprising: a mutation in a P-domain of said nucleic acid-targeting nucleic acid; an engineered nucleic acid-targeting nucleic acid comprising: a mutation in a bulge region of a nucleic acid-targeting nucleic acid

[0084] In one aspect the disclosure provides for a pharmaceutical composition comprising a composition selected from the group consisting of: A composition comprising: an engineered nucleic acid-targeting nucleic acid comprising a 3′ hybridizing extension, and a donor polynucleotide, wherein said donor polynucleotide is hybridized to said 3′ hybridizing extension; a composition comprising: an effector protein, and a nucleic acid, wherein said nucleic acid comprises: at least 50% sequence identity to a crRNA over 6 contiguous nucleotides, at least 50% sequence identity to a tracrRNA over 6 contiguous nucleotides, and a non-native sequence, wherein said nucleic acid is adapted to bind to said effector protein; a composition comprising: a multiplexed genetic targeting agent, wherein said multiplexed genetic targeting agent comprises one or more nucleic acid modules, wherein said nucleic acid module comprises a non-native sequence, and wherein said nucleic acid module is configured to bind to a polypeptide comprising at least 10% amino acid sequence identity to a nuclease domain of Cas9 and wherein said nucleic acid module is configured to hybridize to a target nucleic acid; a composition comprising: a modified site-directed polypeptide, wherein said polypeptide is modified such that it is adapted to target a second protospacer adjacent motif compared to a wild-type site-directed polypeptide; a composition comprising: a modified site-directed polypeptide, wherein said polypeptide is modified such that it is adapted to target a second nucleic acid-targeting nucleic acid compared to a wild-type site-directed polypeptide; a composition comprising: a modified site-directed polypeptide comprising a modification in a bridge helix as compared to SEQ ID: 8; a composition comprising: a modified site-directed polypeptide comprising a modification in a highly basic patch as compared to SEQ ID: 8; a composition comprising: a modified site-directed polypeptide comprising a modification in a polymerase-like domain as compared to SEQ ID: 8; a composition comprising: a modified site-directed polypeptide comprising a modification in a bridge helix, highly basic patch, nuclease domain, and polymerase domain as compared to SEQ ID: 8, or any combination thereof; a composition comprising: a modified site-directed polypeptide comprising a modified nuclease domain as compared to SEQ ID: 8; a composition comprising: a first complex comprising: a first site-directed polypeptide and a first nucleic acid-targeting nucleic acid, a second complex comprising: a second site-directed polypeptide and a second nucleic acid-targeting nucleic acid, wherein, said first and second nucleic acid-targeting nucleic acids are different; a composition comprising: a plurality of nucleic acid molecules, wherein each nucleic acid molecule comprises a nucleic acid-binding protein binding site, wherein at least one of said plurality of nucleic acid molecules encodes for a nucleic acid-targeting nucleic acid and one of said plurality of nucleic acid molecules encodes for a site-directed polypeptide, and a fusion polypeptide, wherein said fusion polypeptide comprises a plurality of said nucleic acid-binding proteins, wherein said plurality of nucleic acid-binding proteins are adapted to bind to their cognate nucleic acid-binding protein binding site; and a composition comprising: a nucleic acid comprising: a spacer, wherein said spacer is between 12-30 nucleotides, inclusive, and wherein said spacer is adapted to hybridize to a sequence that is 5′ to a PAM, a first duplex, wherein said first duplex is 3′ to said spacer, a bulge, wherein said bulge comprises at least 3 unpaired nucleotides on a first strand of said first duplex and at least 1 unpaired nucleotide on a second strand of said first duplex, a linker, wherein said linker links said first strand and said second strand of said duplex and is at least 3 nucleotides in length, a P-domain, and a second duplex, wherein said second duplex is 3′ of said P-domain and is adapted to bind to a site directed polypeptide; or any combination thereof.

[0085] In one aspect, the disclosure provides for a pharmaceutical composition comprising a modified site-directed polypeptide comprising: a first nuclease domain, a second nuclease domain, and an inserted nuclease domain.

[0086] In one aspect the disclosure provides for a pharmaceutical composition comprising a donor polynucleotide comprising: a genetic element of interest, and a reporter element, wherein said reporter element comprises a polynucleotide sequence encoding a site-directed polypeptide, and one or more a nucleic acids, wherein said one or more nucleic acids comprises a sequence comprising at least 50% sequence identity to a crRNA over 6 contiguous nucleotides and a sequence comprising at least 50% sequence identity to a tracrRNA over 6 contiguous nucleotides.

[0087] In one aspect the disclosure provides for a pharmaceutical composition a vector selected from the group consisting of: a vector comprising a polynucleotide sequence encoding An engineered nucleic acid-targeting nucleic acid comprising: a mutation in a P-domain of said nucleic acid-targeting nucleic acid; a vector comprising a polynucleotide sequence encoding an engineered nucleic acid-targeting nucleic acid comprising: a mutation in a bulge region of a nucleic acid-targeting nucleic acid; and modifying the target nucleic acid; a vector comprising a polynucleotide sequence encoding a modified nucleic acid-targeting nucleic acid, wherein the modified nucleic acid-targeting nucleic acid comprises a non-native sequence; a vector comprising: a polynucleotide sequence encoding: a modified nucleic acid-targeting nucleic acid, wherein the modified nucleic acid-targeting nucleic acid comprises a sequence configured to bind to an effector protein, and a site-directed polypeptide; a vector comprising: a polynucleotide sequence encoding: a modified nucleic acid-targeting nucleic acid, wherein the modified nucleic acid-targeting nucleic acid comprises a non-native sequence, a site-directed polypeptide, and an effector protein; a vector comprising a polynucleotide sequence encoding a multiplexed genetic targeting agent, wherein the multiplexed genetic targeting agent comprises one or more nucleic acid modules, wherein the nucleic acid module comprises a non-native sequence, and wherein the nucleic acid module is configured to bind to a polypeptide comprising at least 10% amino acid sequence identity to a nuclease domain of Cas9 and wherein the nucleic acid module is configured to hybridize to a target nucleic acid; a vector comprising a polynucleotide sequence encoding a modified site-directed polypeptide comprising a modification in a bridge helix, highly basic patch, nuclease domain, and polymerase domain as compared to SEQ ID: 8, or any combination thereof; a vector comprising a polynucleotide sequence encoding: two or more nucleic acid-targeting nucleic acids that differ by at least one nucleotide; and a site-directed polypeptide; a vector comprising: a polynucleotide sequence encoding a composition comprising: a plurality of nucleic acid molecules, wherein each nucleic acid molecule comprises a nucleic acid-binding protein binding site, wherein at least one of the plurality of nucleic acid molecules encodes for a nucleic acid-targeting nucleic acid and one of the plurality of nucleic acid molecules encodes for a site-directed polypeptide; and a fusion polypeptide, wherein the fusion polypeptide comprises a plurality of the nucleic acid-binding proteins, wherein the plurality of nucleic acid-binding proteins are adapted to bind to their cognate nucleic acid-binding protein binding site stoichiometrically delivering the composition to the subcellular location; an expression vector comprising a polynucleotide sequence encoding for a genetic element of interest; and a reporter element, wherein the reporter element comprises a polynucleotide sequence encoding a site-directed polypeptide, and one or more a nucleic acids, wherein the one or more nucleic acids comprises a sequence comprising at least 50% sequence identity to a crRNA over 6 contiguous nucleotides and a sequence comprising at least 50% sequence identity to a tracrRNA over 6 contiguous nucleotides; and a vector comprising a polynucleotide sequence encoding a nucleic acid comprising: a spacer, wherein the spacer is between 12-30 nucleotides, inclusive, and wherein the spacer is adapted to hybridize to a sequence that is 5′ to a PAM; a first duplex, wherein the first duplex is 3′ to the spacer; a bulge, wherein the bulge comprises at least 3 unpaired nucleotides on a first strand of the first duplex and at least 1 unpaired nucleotide on a second strand of the first duplex; a linker, wherein the linker links the first strand and the second strand of the duplex and is at least 3 nucleotides in length; a P-domain; and a second duplex, wherein the second duplex is 3′ of the P-domain and is adapted to bind to a site directed polypeptide; or any combination thereof.

[0088] In one aspect the disclosure provides for a method of treating a disease comprising administering to a subject: an engineered nucleic acid-targeting comprising: a mutation in a P-domain of said nucleic acid-targeting nucleic acid; an engineered nucleic acid-targeting nucleic acid comprising: a mutation in a bulge region of a nucleic acid-targeting nucleic acid; a composition comprising: an engineered nucleic acid-targeting nucleic acid comprising a 3′ hybridizing extension, and a donor polynucleotide, wherein said donor polynucleotide is hybridized to said 3′ hybridizing extension; a composition comprising: an effector protein, and a nucleic acid, wherein said nucleic acid comprises: at least 50% sequence identity to a crRNA over 6 contiguous nucleotides, at least 50% sequence identity to a tracrRNA over 6 contiguous nucleotides, and a non-native sequence, wherein said nucleic acid is adapted to bind to said effector protein; a composition comprising: a multiplexed genetic targeting agent, wherein said multiplexed genetic targeting agent comprises one or more nucleic acid modules, wherein said nucleic acid module comprises a non-native sequence, and wherein said nucleic acid module is configured to bind to a polypeptide comprising at least 10% amino acid sequence identity to a nuclease domain of Cas9 and wherein said nucleic acid module is configured to hybridize to a target nucleic acid; a composition comprising: a modified site-directed polypeptide, wherein said polypeptide is modified such that it is adapted to target a second protospacer adjacent motif compared to a wild-type site-directed polypeptide; a composition comprising: a modified site-directed polypeptide, wherein said polypeptide is modified such that it is adapted to target a second nucleic acid-targeting nucleic acid compared to a wild-type site-directed polypeptide; a composition comprising: a modified site-directed polypeptide comprising a modification in a bridge helix as compared to SEQ ID: 8; a composition comprising: a modified site-directed polypeptide comprising a modification in a highly basic patch as compared to SEQ ID: 8; a composition comprising: a modified site-directed polypeptide comprising a modification in a polymerase-like domain as compared to SEQ ID: 8; a composition comprising: a modified site-directed polypeptide comprising a modification in a bridge helix, highly basic patch, nuclease domain, and polymerase domain as compared to SEQ ID: 8, or any combination thereof; a composition comprising: a modified site-directed polypeptide comprising a modified nuclease domain as compared to SEQ ID: 8; a composition comprising: a first complex comprising: a first site-directed polypeptide and a first nucleic acid-targeting nucleic acid, a second complex comprising: a second site-directed polypeptide and a second nucleic acid-targeting nucleic acid, wherein, said first and second nucleic acid-targeting nucleic acids are different; a composition comprising: a plurality of nucleic acid molecules, wherein each nucleic acid molecule comprises a nucleic acid-binding protein binding site, wherein at least one of said plurality of nucleic acid molecules encodes for a nucleic acid-targeting nucleic acid and one of said plurality of nucleic acid molecules encodes for a site-directed polypeptide, and a fusion polypeptide, wherein said fusion polypeptide comprises a plurality of said nucleic acid-binding proteins, wherein said plurality of nucleic acid-binding proteins are adapted to bind to their cognate nucleic acid-binding protein binding site; a composition comprising: a nucleic acid comprising: a spacer, wherein said spacer is between 12-30 nucleotides, inclusive, and wherein said spacer is adapted to hybridize to a sequence that is 5′ to a PAM, a first duplex, wherein said first duplex is 3′ to said spacer, a bulge, wherein said bulge comprises at least 3 unpaired nucleotides on a first strand of said first duplex and at least 1 unpaired nucleotide on a second strand of said first duplex, a linker, wherein said linker links said first strand and said second strand of said duplex and is at least 3 nucleotides in length, a P-domain, and a second duplex, wherein said second duplex is 3′ of said P-domain and is adapted to bind to a site directed polypeptide; a modified site-directed polypeptide comprising: a first nuclease domain, a second nuclease domain, and an inserted nuclease domain; a donor polynucleotide comprising: a genetic element of interest, and a reporter element, wherein said reporter element comprises a polynucleotide sequence encoding a site-directed polypeptide, and one or more a nucleic acids, wherein said one or more nucleic acids comprises a sequence comprising at least 50% sequence identity to a crRNA over 6 contiguous nucleotides and a sequence comprising at least 50% sequence identity to a tracrRNA over 6 contiguous nucleotides; a vector comprising a polynucleotide sequence encoding An engineered nucleic acid-targeting nucleic acid comprising: a mutation in a P-domain of said nucleic acid-targeting nucleic acid; a vector comprising a polynucleotide sequence encoding an engineered nucleic acid-targeting nucleic acid comprising: a mutation in a bulge region of a nucleic acid-targeting nucleic acid; and modifying the target nucleic acid; a vector comprising a polynucleotide sequence encoding a modified nucleic acid-targeting nucleic acid, wherein the modified nucleic acid-targeting nucleic acid comprises a non-native sequence; a vector comprising: a polynucleotide sequence encoding: a modified nucleic acid-targeting nucleic acid, wherein the modified nucleic acid-targeting nucleic acid comprises a sequence configured to bind to an effector protein, and a site-directed polypeptide; a vector comprising: a polynucleotide sequence encoding: a modified nucleic acid-targeting nucleic acid, wherein the modified nucleic acid-targeting nucleic acid comprises a non-native sequence, a site-directed polypeptide, and an effector protein; a vector comprising a polynucleotide sequence encoding a multiplexed genetic targeting agent, wherein the multiplexed genetic targeting agent comprises one or more nucleic acid modules, wherein the nucleic acid module comprises a non-native sequence, and wherein the nucleic acid module is configured to bind to a polypeptide comprising at least 10% amino acid sequence identity to a nuclease domain of Cas9 and wherein the nucleic acid module is configured to hybridize to a target nucleic acid; a vector comprising a polynucleotide sequence encoding a modified site-directed polypeptide comprising a modification in a bridge helix, highly basic patch, nuclease domain, and polymerase domain as compared to SEQ ID: 8, or any combination thereof; a vector comprising a polynucleotide sequence encoding: two or more nucleic acid-targeting nucleic acids that differ by at least one nucleotide; and a site-directed polypeptide; a vector comprising: a polynucleotide sequence encoding a composition comprising: a plurality of nucleic acid molecules, wherein each nucleic acid molecule comprises a nucleic acid-binding protein binding site, wherein at least one of the plurality of nucleic acid molecules encodes for a nucleic acid-targeting nucleic acid and one of the plurality of nucleic acid molecules encodes for a site-directed polypeptide; and a fusion polypeptide, wherein the fusion polypeptide comprises a plurality of the nucleic acid-binding proteins, wherein the plurality of nucleic acid-binding proteins are adapted to bind to their cognate nucleic acid-binding protein binding site stoichiometrically delivering the composition to the subcellular location; an expression vector comprising a polynucleotide sequence encoding for a genetic element of interest; and a reporter element, wherein the reporter element comprises a polynucleotide sequence encoding a site-directed polypeptide, and one or more a nucleic acids, wherein the one or more nucleic acids comprises a sequence comprising at least 50% sequence identity to a crRNA over 6 contiguous nucleotides and a sequence comprising at least 50% sequence identity to a tracrRNA over 6 contiguous nucleotides; and a vector comprising a polynucleotide sequence encoding a nucleic acid comprising: a spacer, wherein the spacer is between 12-30 nucleotides, inclusive, and wherein the spacer is adapted to hybridize to a sequence that is 5′ to a PAM; a first duplex, wherein the first duplex is 3′ to the spacer; a bulge, wherein the bulge comprises at least 3 unpaired nucleotides on a first strand of the first duplex and at least 1 unpaired nucleotide on a second strand of the first duplex; a linker, wherein the linker links the first strand and the second strand of the duplex and is at least 3 nucleotides in length; a P-domain; and a second duplex, wherein the second duplex is 3′ of the P-domain and is adapted to bind to a site directed polypeptide; or any combination thereof. In some embodiments, the administering comprises administering comprises administering by viral delivery. In some embodiments, the administering comprises administering comprises administering by electroporation. In some embodiments, the administering comprises administering comprises administering by nanoparticle delivery. In some embodiments, the administering comprises administering comprises administering by liposome delivery. In some embodiments, the administering comprises administering by a method selected from the group consisting of: intravenously, subcutaneously, intramuscularly, orally, rectally, by aerosol, parenterally, ophthalmically, pulmonarily, transdermally, vaginally, optically, nasally, and by topical administration, or any combination thereof. In some embodiments, the methods of the disclosure are performed in a cell selected from the group consisting of: plant cell, microbe cell, and fungi cell, or any combination thereof.

### INCORPORATION BY REFERENCE

[0089] All publications, patents, and patent applications mentioned in this specification are herein incorporated by reference to the same extent as if each individual publication, patent, or patent application was specifically and individually indicated to be incorporated by reference.

### BRIEF DESCRIPTION OF THE DRAWINGS

[0090] The novel features of the invention are set forth with particularity in the appended claims. A better understanding of the features and advantages of the present invention will be obtained by reference to the following detailed description that sets forth illustrative embodiments, in which the principles of the invention are utilized, and the accompanying drawings of which:

[0091] FIG. 1A depicts an exemplary embodiment of a single guide nucleic acid-targeting nucleic acid of the disclosure.

[0092] FIG. 1B depicts an exemplary embodiment of a single guide nucleic acid-targeting nucleic acid of the disclosure.

[0093] FIG. 2 depicts an exemplary embodiment of a double guide nucleic acid-targeting nucleic acid of the disclosure.

[0094] FIG. 3 depicts an exemplary embodiment of a sequence enrichment method of the disclosure utilizing target nucleic acid cleavage.

[0095] FIG. 4 depicts an exemplary embodiment of a sequence enrichment method of the disclosure utilizing target nucleic acid enrichment.

[0096] FIG. 5 depicts an exemplary embodiment of a method of the disclosure for determining off-target binding sites of a site-directed polypeptide utilizing purification of the site-directed polypeptide.

[0097] FIG. 6 depicts an exemplary embodiment of a method of the disclosure for determining off-target binding sites of a site-directed polypeptide utilizing purification of the nucleic acid-targeting nucleic acid.

[0098] FIG. 7 illustrates an exemplary embodiment for an array-based sequencing method using a site-directed polypeptide of the disclosure.

[0099] FIG. 8 illustrates an exemplary embodiment for an array-based sequencing method using a site-directed polypeptide of the disclosure, wherein cleaved products are sequenced.

[0100] FIG. 9 illustrates an exemplary embodiment for a next-generation sequencing-based method using a site-directed polypeptide of the disclosure.

[0101] FIG. 10 depicts an exemplary tagged single guide nucleic acid-targeting nucleic acid.

[0102] FIG. 11 depicts an exemplary tagged double guide nucleic acid-targeting nucleic acid.

[0103] FIG. 12 illustrates an exemplary embodiment of a method of using tagged nucleic acid-targeting nucleic acid with a split system (e.g., split fluorescent system).

[0104] FIGS. 13A, 13B, 13C and 13D depict some exemplary data on the effect of a 5′ tagged nucleic acid-targeting nucleic acid on target nucleic acid cleavage.

[0105] FIG. 14 illustrates an exemplary 5′ tagged nucleic acid-targeting nucleic acid comprising a tag linker sequence between the nucleic acid-targeting nucleic acid and the tag.

[0106] FIG. 15 depicts an exemplary embodiment of a method of multiplexed target nucleic acid cleavage.

[0107] FIG. 16 depicts an exemplary embodiment of a method of stoichiometric delivery of RNA nucleic acids.

[0108] FIG. 17 depicts an exemplary embodiment of a method of stoichiometric delivery of nucleic acids.

[0109] FIG. 18 depicts an exemplary embodiment of seamless insertion of a reporter element into a target nucleic acid using a site-directed polypeptide of the disclosure.

[0110] FIG. 19 depicts an exemplary embodiment for removing a reporter element from a target nucleic acid.

[0111] FIG. 20 depicts complementary portions of the nucleic acid sequences (SEQ ID NO: 569) of a pre-CRISPR nucleic acid and tracr nucleic acid sequences from Streptococcus pyogenes SF370.

[0112] FIG. 21 depicts an exemplary secondary structure of a synthetic single guide nucleic acid-targeting nucleic acid (SEQ ID NO: 1518).

[0113] FIG. 22A and B shows exemplary single-guide nucleic acid-targeting nucleic acid backbone variants. Nucleotides in the boxes correspond to nucleotides that have been altered relative to CRISPR sequences labeled as FL-tracr-crRNA sequence. FIG. 22A discloses SEQ ID NOs: 1519, 1518, 1520, 1523, 1521, 1524, 1522, and 1525, respectively, in order of appearance. FIG. 22B discloses 1526, 1530, 1527, 1531, 1528, 1532, 1529, and 1533, respectively, in order of appearance.

[0114] FIG. 23A-C shows exemplary data from an in vitro cleavage assay. The results demonstrate that more than one synthetic nucleic acid-targeting nucleic acid backbone sequences can support cleavage by a site-directed polypeptide (e.g., Cas9).

[0115] FIG. 24 shows exemplary synthetic single-guide nucleic acid-targeting nucleic acid sequences containing variants in the complementary region/duplex. Nucleotides in the boxes correspond to nucleotides that have been altered relative to the CRISPR sequences labeled as FL-tracr-crRNA sequence. FIG. 24 discloses SEQ ID NOs: 1519, 1534, 1538, 1535, 1539, 1536, 1540, 1537, and 1541, respectively, in order of appearance.

[0116] FIG. 25 shows exemplary variants to the single guide nucleic acid-targeting nucleic acid structure within the region 3′ to the complementary region/duplex. Nucleotides in the boxes correspond to nucleotides that have been altered relative to the naturally occurring S. pyogenes SF370 CRISPR nucleic acid and tracr nucleic acid sequence pairing. FIG. 25 discloses SEQ ID NOs: 1542, 1546, 1543, 1547, 1544, 1548, 1545, and 1549, respectively, in order of appearance.

[0117] FIG. 26A-B shows exemplary variants to the single guide nucleic acid-targeting nucleic acid structure within the region 3′ to the complementary region/duplex. Nucleotides in the boxes correspond to nucleotides that have been altered relative to the naturally occurring S. pyogenes SF370 CRISPR nucleic acid and tracr nucleic acid sequence pairing. FIG. 26A discloses SEQ ID NOs: 1519, 1550, 1554, 1551, 1552, 1555, 1553, and 1556, respectively, in order of appearance. FIG. 26B discloses SEQ ID NOs: 1557, 1561, and 1558-1560, respectively, in order of appearance.

[0118] FIG. 27A-B shows exemplary variant nucleic acid-targeting nucleic acid structures comprising additional hairpin sequences derived from the CRISPR repeat in Pseudomonas aeruginosa (PA14). The sequences in the boxes can bind to the ribonuclease Csy4 from PA14. FIG. 27A discloses SEQ ID NOs: 1519, 1562, and 1563, respectively, in order of appearance. FIG. 27B discloses SEQ ID NOs: 1564 and 1565, respectively, in order of appearance.

[0119] FIG. 28 shows exemplary data from an in vitro cleavage assay demonstrating that multiple synthetic nucleic acid-targeting nucleic acid backbone sequences support Cas9 cleavage. The top and bottom gel images represent two independent repeats of the assay.

[0120] FIG. 29 shows exemplary data from an in vitro cleavage assay demonstrating that multiple synthetic nucleic acid-targeting nucleic acid backbone sequences support Cas9 cleavage. The top and bottom gel images represent two independent repeats of the assay.

[0121] FIGS. 30A-30F depict exemplary methods of the disclosure of bringing a donor polynucleotide to a modification site in a target nucleic acid.

[0122] FIG. 31 depicts a system for storing and sharing electronic information.

[0123] FIG. 32 depicts an exemplary embodiment of two nickases generating a blunt end cut in a target nucleic acid (SEQ ID NO: 1566). The site-directed modifying polypeptides complexed with nucleic acid-targeting nucleic acids are not shown.

[0124] FIG. 33 depicts an exemplary embodiment of staggard cutting of a target nucleic acid (SEQ ID NO: 1566) using two nickases and generating sticky ends. The site-directed modifying polypeptides complexed with nucleic acid-targeting nucleic acids are not shown.

[0125] FIG. 34 depicts an exemplary embodiment of staggard cutting of a target nucleic acid (SEQ ID NO: 1567) using two nickases and generating medium-sized sticky ends. The site-directed modifying polypeptides complexed with nucleic acid-targeting nucleic acids are not shown.

[0126] FIG. 35 illustrates a sequence alignment of Cas9 orthologues (SEQ ID NOs: 1568-1579, respectively, in order of appearance). Amino acids with a “X” below them may be considered to be similar. Amino acids with a “Y” below them can be considered to be highly conserved or identical in all sequences. Amino acids residues without an “X” or a “Y” may not be conserved.

[0127] FIG. 36 shows the functionality of nucleic acid-targeting nucleic acid variants on target nucleic acid cleavage. The variants tested in FIG. 36 correspond to the variants depicted in FIG. 22A, FIG. 22B, FIG. 24, and FIG. 25.

[0128] FIG. 37A-D shows in vitro cleavage assays using variant nucleic acid-targeting nucleic acids.

[0129] FIG. 38 depicts exemplary amino acid sequences (SEQ ID NOs: 1580-1582, respectively, in order of appearance) of Csy4 from wild-type P. aeruginosa.

[0130] FIG. 39 depicts exemplary amino acid sequences (SEQ ID NOs: 1583-1584, respectively, in order of appearance) of an enzymatically inactive endoribonuclease (e.g., Csy4).

[0131] FIG. 40 depicts exemplary amino acid sequences (SEQ ID NOs: 1580-1582, respectively, in order of appearance) of Csy4 from P. aeruginosa.

[0132] FIG. 41A-J depicts exemplary Cas6 amino acid sequences (SEQ ID NOs: 1585-1603, respectively, in order of appearance).

[0133] FIG. 42A-C depicts exemplary Cas6 amino acid sequences (SEQ ID NOs: 1604-1608, respectively, in order of appearance).

### DETAILED DESCRIPTION OF THE INVENTION

### Definitions

[0134] As used herein, “affinity tag” can refer to either a peptide affinity tag or a nucleic acid affinity tag. Affinity tag generally refer to a protein or nucleic acid sequence that can be bound to a molecule (e.g., bound by a small molecule, protein, covalent bond). An affinity tag can be a non-native sequence. A peptide affinity tag can comprise a peptide. A peptide affinity tag can be one that is able to be part of a split system (e.g., two inactive peptide fragments can combine together in trans to form an active affinity tag). A nucleic acid affinity tag can comprise a nucleic acid. A nucleic acid affinity tag can be a sequence that can selectively bind to a known nucleic acid sequence (e.g. through hybridization). A nucleic acid affinity tag can be a sequence that can selectively bind to a protein. An affinity tag can be fused to a native protein. An affinity tag can be fused to a nucleotide sequence. Sometimes, one, two, or a plurality of affinity tags can be fused to a native protein or nucleotide sequence. An affinity tag can be introduced into a nucleic acid-targeting nucleic acid using methods of in vitro or in vivo transcription. Nucleic acid affinity tags can include, for example, a chemical tag, an RNA-binding protein binding sequence, a DNA-binding protein binding sequence, a sequence hybridizable to an affinity-tagged polynucleotide, a synthetic RNA aptamer, or a synthetic DNA aptamer. Examples of chemical nucleic acid affinity tags can include, but are not limited to, ribo-nucleotriphosphates containing biotin, fluorescent dyes, and digoxeginin. Examples of protein-binding nucleic acid affinity tags can include, but are not limited to, the MS2 binding sequence, the U1A binding sequence, stem-loop binding protein sequences, the boxB sequence, the eIF4A sequence, or any sequence recognized by an RNA binding protein. Examples of nucleic acid affinity-tagged oligonucleotides can include, but are not limited to, biotinylated oligonucleotides, 2, 4-dinitrophenyl oligonucleotides, fluorescein oligonucleotides, and primary amine-conjugated oligonucleotides.

[0135] A nucleic acid affinity tag can be an RNA aptamer. Aptamers can include, aptamers that bind to theophylline, streptavidin, dextran B512, adenosine, guanosine, guanine/xanthine, 7-methyl-GTP, amino acid aptamers such as aptamers that bind to arginine, citrulline, valine, tryptophan, cyanocobalamine, N-methylmesoporphyrin IX, flavin, NAD, and antibiotic aptamers such as aptamers that bind to tobramycin, neomycin, lividomycin, kanamycin, streptomycin, viomycin, and chloramphenicol.

[0136] A nucleic acid affinity tag can comprise an RNA sequence that can be bound by a site-directed polypeptide. The site-directed polypeptide can be conditionally enzymatically inactive. The RNA sequence can comprise a sequence that can be bound by a member of Type I, Type II, and/or Type III CRISPR systems. The RNA sequence can be bound by a RAMP family member protein. The RNA sequence can be bound by a Cas6 family member protein (e.g., Csy4, Cas6). The RNA sequence can be bound by a Cas5 family member protein (e.g., Cas5). For example, Csy4 can bind to a specific RNA hairpin sequence with high affinity (Kd˜50 pM) and can cleave RNA at a site 3′ to the hairpin. The Cas5 or Cas6 family member protein can bind an RNA sequence that comprises at least about or at most about 30%, 40%, 50%, 60%, 70%, 75%, 80%, 85%, 90%, 95%, or 100% sequence identity and/or sequence similarity to the following nucleotide sequences:

(SEQ ID NO: 1347)
5′-GUUCACUGCCGUAUAGGCAGCUAAGAAA-3′;
(SEQ ID NO: 1347)
5′-GUUCACUGCCGUAUAGGCAGCUAAGAAA-3′;
(SEQ ID NO: 1348)
5′-GUUGCAAGGGAUUGAGCCCCGUAAGGGGAUUGCGAC-3′;
(SEQ ID NO: 1349)
5′-GUUGCAAACCUCGUUAGCCUCGUAGAGGAUUGAAAC-3′;
(SEQ ID NO: 1350)
5′-GGAUCGAUACCCACCCCGAAGAAAAGGGGACGAGAAC-3′;
(SEQ ID NO: 1351)
5′-GUCGUCAGACCCAAAACCCCGAGAGGGGACGGAAAC-3′;
(SEQ ID NO: 1352)
5′-GAUAUAAACCUAAUUACCUCGAGAGGGGACGGAAAC-3′;
(SEQ ID NO: 1353)
5′-CCCCAGUCACCUCGGGAGGGGACGGAAAC-3′;
(SEQ ID NO: 1354)
5′-GUUCCAAUUAAUCUUAAACCCUAUUAGGGAUUGAAAC-3′;
(SEQ ID NO: 1348)
5′-GUUGCAAGGGAUUGAGCCCCGUAAGGGGAUUGCGAC-3′;
(SEQ ID NO: 1349)
5′-GUUGCAAACCUCGUUAGCCUCGUAGAGGAUUGAAAC-3′;
(SEQ ID NO: 1350)
5′-GGAUCGAUACCCACCCCGAAGAAAAGGGGACGAGAAC-3′;
(SEQ ID NO: 1351)
5′-GUCGUCAGACCCAAAACCCCGAGAGGGGACGGAAAC-3′;
(SEQ ID NO: 1352)
5′-GAUAUAAACCUAAUUACCUCGAGAGGGGACGGAAAC-3′;
(SEQ ID NO: 1353)
5′-CCCCAGUCACCUCGGGAGGGGACGGAAAC-3′;
(SEQ ID NO: 1354)
5′-GUUCCAAUUAAUCUUAAACCCUAUUAGGGAUUGAAAC-3′;
(SEQ ID NO: 1355)
5′-GUCGCCCCCCACGCGGGGGCGUGGAUUGAAAC-3′;
(SEQ ID NO: 1356)
5′-CCAGCCGCCUUCGGGCGGCUGUGUGUUGAAAC-3′;
(SEQ ID NO: 1357)
5′-GUCGCACUCUACAUGAGUGCGUGGAUUGAAAU-3′;
(SEQ ID NO: 1358)
5′-UGUCGCACCUUAUAUAGGUGCGUGGAUUGAAAU-3′;
and
(SEQ ID NO: 1359)
5′-GUCGCGCCCCGCAUGGGGCGCGUGGAUUGAAA-3′.

[0137] A nucleic acid affinity tag can comprise a DNA sequence that can be bound by a site-directed polypeptide. The site-directed polypeptide can be conditionally enzymatically inactive. The DNA sequence can comprise a sequence that can be bound by a member of the Type I, Type II and/or Type III CRISPR system. The DNA sequence can be bound by an Argonaut protein. The DNA sequence can be bound by a protein containing a zinc finger domain, a TALE domain, or any other DNA-binding domain.

[0138] A nucleic acid affinity tag can comprise a ribozyme sequence. Suitable ribozymes can include peptidyl transferase 23S rRNA, RnaseP, Group I introns, Group II introns, GIR1 branching ribozyme, Leadzyme, hairpin ribozymes, hammerhead ribozymes, HDV ribozymes, CPEB3 ribozymes, VS ribozymes, glmS ribozyme, CoTC ribozyme, and synthetic ribozymes.

[0139] Peptide affinity tags can comprise tags that can be used for tracking or purification (e.g., a fluorescent protein, green fluorescent protein (GFP), YFP, RFP, CFP, mCherry, tdTomato, a his tag, (e.g., a 6XHis tag), a hemagglutinin (HA) tag, a FLAG tag, a Myc tag, a GST tag, a MBP tag, and chitin binding protein tag, a calmodulin tag, a V5 tag, a streptavidin binding tag, and the like).

[0140] Both nucleic acid and peptide affinity tags can comprise small molecule tags such as biotin, or digitoxin, fluorescent label tags, such as for example, fluoroscein, rhodamin, Alexa fluor dyes, Cyanine3 dye, Cyanine5 dye.

[0141] Nucleic acid affinity tags can be located 5′ to a nucleic acid (e.g., a nucleic acid-targeting nucleic acid). Nucleic acid affinity tags can be located 3′ to a nucleic acid. Nucleic acid affinity tags can be located 5′ and 3′ to a nucleic acid. Nucleic acid affinity tags can be located within a nucleic acid. Peptide affinity tags can be located N-terminal to a polypeptide sequence. Peptide affinity tags can be located C-terminal to a polypeptide sequence. Peptide affinity tags can be located N-terminal and C-terminal to a polypeptide sequence. A plurality of affinity tags can be fused to a nucleic acid and/or a polypeptide sequence.

[0142] As used herein, “capture agent” can generally refer to an agent that can purify a polypeptide and/or a nucleic acid. A capture agent can be a biologically active molecule or material (e.g. any biological substance found in nature or synthetic, and includes but is not limited to cells, viruses, subcellular particles, proteins, including more specifically antibodies, immunoglobulins, antigens, lipoproteins, glycoproteins, peptides, polypeptides, protein complexes, (strept) avidin-biotin complexes, ligands, receptors, or small molecules, aptamers, nucleic acids, DNA, RNA, peptidic nucleic acids, oligosaccharides, polysaccharides, lipopolysccharides, cellular metabllites, haptens, pharmacologically active substances, alkaloids, steroids, vitamins, amino acids, and sugures). In some embodiments, the capture agent can comprise an affinity tag. In some embodiments, a capture agent can preferentially bind to a target polypeptide or nucleic acid of interest. Capture agents can be free floating in a mixture. Capture agents can be bound to a particle (e.g. a bead, a microbead, a nanoparticle). Capture agents can be bound to a solid or semisolid surface. In some instances, capture agents are irreversibly bound to a target. In other instances, capture agents are reversibly bound to a target (e.g. if a target can be eluted, or by use of a chemical such as imidizole).

[0143] As used herein, “Cas5” can generally refer to can refer to a polypeptide with at least about 5%, 10%, 20%, 30%, 40%, 50%, 60%, 70%, 80%, 90%, 100% sequence identity and/or sequence similarity to a wild type exemplary Cas5 polypeptide (e.g., Cas5 from D. vulgaris, and/or any sequences depicted in FIG. 42). Cas5 can generally refer to can refer to a polypeptide with at most about 5%, 10%, 20%, 30%, 40%, 50%, 60%, 70%, 80%, 90%, 100% sequence identity and/or sequence similarity to a wild type exemplary Cas5 polypeptide (e.g., a Cas5 from D. vulgaris). Cas5 can refer to the wild type or a modified form of the Cas5 protein that can comprise an amino acid change such as a deletion, insertion, substitution, variant, mutation, fusion, chimera, or any combination thereof.

[0144] As used herein, “Cas6” can generally refer to can refer to a polypeptide with at least about 5%, 10%, 20%, 30%, 40%, 50%, 60%, 70%, 80%, 90%, 100% sequence identity and/or sequence similarity to a wild type exemplary Cas6 polypeptide (e.g., a Cas6 from T. thermophilus, and/or sequences depicted in FIG. 41). Cas6 can generally refer to can refer to a polypeptide with at most about 5%, 10%, 20%, 30%, 40%, 50%, 60%, 70%, 80%, 90%, 100% sequence identity and/or sequence similarity to a wild type exemplary Cas6 polypeptide (e.g., from T. thermophilus). Cas6 can refer to the wild type or a modified form of the Cas6 protein that can comprise an amino acid change such as a deletion, insertion, substitution, variant, mutation, fusion, chimera, or any combination thereof.

[0145] As used herein, “Cas9” can generally refer to a polypeptide with at least about 5%, 10%, 20%, 30%, 40%, 50%, 60%, 70%, 80%, 90%, 100% sequence identity and/or sequence similarity to a wild type exemplary Cas9 polypeptide (e.g., Cas9 from S. pyogenes (SEQ ID NO: 8, SEQ ID NO: 1-256, SEQ ID NO: 795-1346). Cas9 can refer to can refer to a polypeptide with at most about 5%, 10%, 20%, 30%, 40%, 50%, 60%, 70%, 80%, 90%, 100% sequence identity and/or sequence similarity to a wild type exemplary Cas9 polypeptide (e.g., from S. pyogenes). Cas9 can refer to the wild type or a modified form of the Cas9 protein that can comprise an amino acid change such as a deletion, insertion, substitution, variant, mutation, fusion, chimera, or any combination thereof.

[0146] As used herein, a “cell” can generally refer to a biological cell. A cell can be the basic structural, functional and/or biological unit of a living organism. A cell can originate from any organism having one or more cells. Some non-limiting examples include: a prokaryotic cell, eukaryotic cell, a bacterial cell, an archacal cell, a cell of a single-cell eukaryotic organism, a protozoa cell, a cell from a plant (e.g. cells from plant crops, fruits, vegetables, grains, soy bean, corn, maize, wheat, seeds, tomatoes, rice, cassava, sugarcane, pumpkin, hay, potatoes, cotton, cannabis, tobacco, flowering plants, conifers, gymnosperms, ferns, clubmosses, hornworts, liverworts, mosses), an algal cell, (e.g., Botryococcus braunii, Chlamydomonas reinhardtii, Nannochloropsis gaditana, Chlorella pyrenoidosa, Sargassum patens C. Agardh, and the like), seaweeds (e.g. kelp) a fungal cell (e.g., a yeast cell, a cell from a mushroom), an animal cell, a cell from an invertebrate animal (e.g. fruit fly, cnidarian, echinoderm, nematode, etc.), a cell from a vertebrate animal (e.g., fish, amphibian, reptile, bird, mammal), a cell from a mammal (e.g., a pig, a cow, a goat, a sheep, a rodent, a rat, a mouse, a non-human primate, a human, etc.), and etcetera. Sometimes a cell is not originating from a natural organism (e.g. a cell can be a synthetically made, sometimes termed an artificial cell).

[0147] A cell can be in vitro. A cell can be in vivo. A cell can be an isolated cell. A cell can be a cell inside of an organism. A cell can be an organism. A cell can be a cell in a cell culture. A cell can be one of a collection of cells. A cell can be a prokaryotic cell or derived from a prokaryotic cell. A cell can be a bacterial cell or can be derived from a bacterial cell. A cell can be an archacal cell or derived from an archacal cell. A cell can be a eukaryotic cell or derived from a eukaryotic cell. A cell can be a plant cell or derived from a plant cell. A cell can be an animal cell or derived from an animal cell. A cell can be an invertebrate cell or derived from an invertebrate cell. A cell can be a vertebrate cell or derived from a vertebrate cell. A cell can be a mammalian cell or derived from a mammalian cell. A cell can be a rodent cell or derived from a rodent cell. A cell can be a human cell or derived from a human cell. A cell can be a microbe cell or derived from a microbe cell. A cell can be a fungi cell or derived from a fungi cell.

[0148] A cell can be a stem cell or progenitor cell. Cells can include stem cells (e.g., adult stem cells, embryonic stem cells, iPS cells) and progenitor cells (e.g., cardiac progenitor cells, neural progenitor cells, etc.). Cells can include mammalian stem cells and progenitor cells, including rodent stem cells, rodent progenitor cells, human stem cells, human progenitor cells, etc. Clonal cells can comprise the progeny of a cell. A cell can comprise a target nucleic acid. A cell can be in a living organism. A cell can be a genetically modified cell. A cell can be a host cell.

[0149] A cell can be a totipotent stem cell, however, in some embodiments of this disclosure, the term “cell” may be used but may not refer to a totipotent stem cell. A cell can be a plant cell, but in some embodiments of this disclosure, the term “cell” may be used but may not refer to a plant cell. A cell can be a pluripotent cell. For example, a cell can be a pluripotent hematopoietic cell that can differentiate into other cells in the hematopoietic cell lineage but may not be able to differentiate into any other non-hematopoetic cell. A cell may be able to develop into a whole organism. A cell may or may not be able to develop into a whole organism. A cell may be a whole organism.

[0150] A cell can be a primary cell. For example, cultures of primary cells can be passaged 0 times, 1 time, 2 times, 4 times, 5 times, 10 times, 15 times or more. Cells can be unicellular organisms. Cells can be grown in culture.

[0151] A cell can be a diseased cell. A diseased cell can have altered metabolic, gene expression, and/or morphologic features. A diseased cell can be a cancer cell, a diabetic cell, and a apoptotic cell. A diseased cell can be a cell from a diseased subject. Exemplary diseases can include blood disorders, cancers, metabolic disorders, eye disorders, organ disorders, musculoskeletal disorders, cardiac disease, and the like.

[0152] If the cells are primary cells, they may be harvested from an individual by any method. For example, leukocytes may be harvested by apheresis, leukocytapheresis, density gradient separation, etc. Cells from tissues such as skin, muscle, bone marrow, spleen, liver, pancreas, lung, intestine, stomach, etc. can be harvested by biopsy. An appropriate solution may be used for dispersion or suspension of the harvested cells. Such solution can generally be a balanced salt solution, (e.g. normal saline, phosphate-buffered saline (PBS), Hank's balanced salt solution, etc.), conveniently supplemented with fetal calf serum or other naturally occurring factors, in conjunction with an acceptable buffer at low concentration. Buffers can include HEPES, phosphate buffers, lactate buffers, etc. Cells may be used immediately, or they may be stored (e.g., by freezing). Frozen cells can be thawed and can be capable of being reused. Cells can be frozen in a DMSO, serum, medium buffer (e.g., 10% DMSO, 50% serum, 40% buffered medium), and/or some other such common solution used to preserve cells at freezing temperatures.

[0153] As used herein, “conditionally enzymatically inactive site-directed polypeptide” can generally refer to a polypeptide that can bind to a nucleic acid sequence in a polynucleotide in a sequence-specific manner, but may not cleave a target polynucleotide except under one or more conditions that render the enzymatic domain active. A conditionally enzymatically inactive site-directed polypeptide can comprise an enzymatically inactive domain that can be conditionally activated. A conditionally enzymatically inactive site-directed polypeptide can be conditionally activated in the presence of imidazole. A conditionally enzymatically inactive site-directed polypeptide can comprise a mutated active site that fails to bind its cognate ligand, resulting in an enzymatically inactive site-directed polypeptide. The mutated active site can be designed to bind to ligand analogues, such that a ligand analogue can bind to the mutated active site and reactive the site-directed polypeptide. For example, ATP binding proteins can comprise a mutated active site that can inhibit activity of the protein, yet are designed to specifically bind to ATP analogues. Binding of an ATP analogue, but not ATP, can reactivate the protein. The conditionally enzymatically inactive site-directed polypeptide can comprise one or more non-native sequences (e.g., a fusion, an affinity tag).

[0154] As used herein, “crRNA” can generally refer to a nucleic acid with at least about 5%, 10%, 20%, 30%, 40%, 50%, 60%, 70%, 80%, 90%, 100% sequence identity and/or sequence similarity to a wild type exemplary crRNA (e.g., a crRNA from S. pyogenes (e.g., SEQ ID NO: 569, SEQ ID NO: 563-679). crRNA can generally refer to a nucleic acid with at most about 5%, 10%, 20%, 30%, 40%, 50%, 60%, 70%, 80%, 90%, 100% sequence identity and/or sequence similarity to a wild type exemplary crRNA (e.g., a crRNA from S. pyogenes). crRNA can refer to a modified form of a crRNA that can comprise an nucleotide change such as a deletion, insertion, or substitution, variant, mutation, or chimera. A crRNA can be a nucleic acid having at least about 60% identical to a wild type exemplary crRNA (e.g., a crRNA from S. pyogenes) sequence over a stretch of at least 6 contiguous nucleotides. For example, a crRNA sequence can be at least about 60% identical, at least about 65% identical, at least about 70% identical, at least about 75% identical, at least about 80% identical, at least about 85% identical, at least about 90% identical, at least about 95% identical, at least about 98% identical, at least about 99% identical, or 100% identical, to a wild type exemplary crRNA sequence (e.g., a crRNA from S. pyogenes) over a stretch of at least 6 contiguous nucleotides.

[0155] As used herein, “CRISPR repeat” or “CRISPR repeat sequence” can refer to a minimum CRISPR repeat sequence.

[0156] As used herein, “Csy4” can generally refer to a polypeptide with at most about 5%, 10%, 20%, 30%, 40%, 50%, 60%, 70%, 80%, 90%, 100% sequence identity and/or sequence similarity to a wild type exemplary Csy4 polypeptide (e.g., Csy4 from P. aeruginosa, see FIG. 40). Csy4 can generally refer to can refer to a polypeptide with at least about 5%, 10%, 20%, 30%, 40%, 50%, 60%, 70%, 80%, 90%, 100% sequence identity and/or sequence similarity to a wild type exemplary Csy4 polypeptide (e.g., Csy4 from P. aeruginosa). Csy4 can refer to the wild type or a modified form of the Csy4 protein that can comprise an amino acid change such as a deletion, insertion, substitution, variant, mutation, fusion, chimera, or any combination thereof.

[0157] As used herein, “endoribonuclease” can generally refer to a polypeptide that can cleave RNA. In some embodiments, an endoribonuclease can be a site-directed polypeptide. An endoribonuclease may be a member of a CRISPR system (e.g., Type I, Type II, Type III). Endoribonuclease can refer to a Repeat Associated Mysterious Protein (RAMP) superfamily of proteins (e.g., Cas6, Cas6, Cas5 families). Endoribonucleases can also include RNase A, RNase H, RNase I, RNase III family members (e.g., Drosha, Dicer, RNase N), RNase L, RNase P, RNase PhyM, RNase T1, RNase T2, RNase U2, RNase V1, RNase V. An endoribonuclease can refer to a conditionally enzymatically inactive endoribonuclease. An endoribonuclease can refer to a catalytically inactive endoribonuclease.

[0158] As used herein, “donor polynucleotide” can refer to a nucleic acid that can be integrated into a site during genome engineering or target nucleic acid engineering.

[0159] As used herein, “fixative” or “cross-linker” can generally refer to an agent that can fix or cross-link cells. Fixed or cross-linking cells can stabilize protein-nucleic acid complexes in the cell. Suitable fixatives and cross-linkers can include, formaldehyde, glutaraldehyde, ethanol-based fixatives, methanol-based fixatives, acetone, acetic acid, osmium tetraoxide, potassium dichromate, chromic acid, potassium permanganate, mercurials, picrates, formalin, paraformaldehyde, amine-reactive NHS-ester crosslinkers such as bis[sulfosuccinimidyl]suberate (BS3), 3,3′-dithiobis[sulfosuccinimidylpropionate] (DTSSP), ethylene glycol bis[sulfosuccinimidylsuccinate (sulfo-EGS), disuccinimidyl glutarate (DSG), dithiobis[succinimidyl propionate] (DSP), disuccinimidyl suberate (DSS), ethylene glycol bis[succinimidylsuccinate] (EGS), NHS-ester/diazirine crosslinkers such as NHS-diazirine, NHS-LC-diazirine, NHS-SS-diazirine, sulfo-NHS-diazirine, sulfo-NHS-LC-diazirine, and sulfo-NHS-SS-diazirine.

[0160] As used herein, “fusion” can refer to a protein and/or nucleic acid comprising one or more non-native sequences (e.g., moieties). A fusion can comprise one or more of the same non-native sequences. A fusion can comprise one or more of different non-native sequences. A fusion can be a chimera. A fusion can comprise a nucleic acid affinity tag. A fusion can comprise a barcode. A fusion can comprise a peptide affinity tag. A fusion can provide for subcellular localization of the site-directed polypeptide (e.g., a nuclear localization signal (NLS) for targeting to the nucleus, a mitochondrial localization signal for targeting to the mitochondria, a chloroplast localization signal for targeting to a chloroplast, an endoplasmic reticulum (ER) retention signal, and the like). A fusion can provide a non-native sequence (e.g., affinity tag) that can be used to track or purify. A fusion can be a small molecule such as biotin or a dye such as alexa fluor dyes, Cyanine3 dye, Cyanine5 dye. The fusion can provide for increased or decreased stability.

[0161] In some embodiments, a fusion can comprise a detectable label, including a moiety that can provide a detectable signal. Suitable detectable labels and/or moieties that can provide a detectable signal can include, but are not limited to, an enzyme, a radioisotope, a member of a specific binding pair; a fluorophore; a fluorescent protein; a quantum dot; and the like.

[0162] A fusion can comprise a member of a FRET pair. FRET pairs (donor/acceptor) suitable for use can include, but are not limited to, EDANS/fluorescein, IAEDANS/fluorescein, fluorescein/tetramethylrhodamine, fluorescein/Cy 5, IEDANS/DABCYL, fluorescein/QSY-7, fluorescein/LC Red 640, fluorescein/Cy 5.5 and fluorescein/LC Red 705.

[0163] A fluorophore/quantum dot donor/acceptor pair can be used as a fusion. Suitable fluorophores (“fluorescent label”) can include any molecule that may be detected via its inherent fluorescent properties, which can include fluorescence detectable upon excitation. Suitable fluorescent labels can include, but are not limited to, fluorescein, rhodamine, tetramethylrhodamine, cosin, erythrosin, coumarin, methyl-coumarins, pyrene, Malacite green, stilbene, Lucifer Yellow, Cascade Blue™, Texas Red, IAEDANS, EDANS, BODIPY FL, LC Red 640, Cy 5, Cy 5.5, LC Red 705 and Oregon green.

[0164] A fusion can comprise an enzyme. Suitable enzymes can include, but are not limited to, horse radish peroxidase, luciferase, beta-galactosidase, and the like.

[0165] A fusion can comprise a fluorescent protein. Suitable fluorescent proteins can include, but are not limited to, a green fluorescent protein (GFP), (e.g., a GFP from Aequoria victoria, fluorescent proteins from Anguilla japonica, or a mutant or derivative thereof), a red fluorescent protein, a yellow fluorescent protein, any of a variety of fluorescent and colored proteins.

[0166] A fusion can comprise a nanoparticle. Suitable nanoparticles can include fluorescent or luminescent nanoparticles, and magnetic nanoparticles. Any optical or magnetic property or characteristic of the nanoparticle(s) can be detected.

[0167] A fusion can comprise quantum dots (QDs). QDs can be rendered water soluble by applying coating layers comprising a variety of different materials. For example, QDs can be solubilized using amphiphilic polymers. Exemplary polymers that have been employed can include octylamine-modified low molecular weight polyacrylic acid, polyethylene-glycol (PEG)-derivatized phospholipids, polyanhydrides, block copolymers, etc. QDs can be conjugated to a polypeptide via any of a number of different functional groups or linking agents that can be directly or indirectly linked to a coating layer. QDs with a wide variety of absorption and emission spectra are commercially available, e.g., from Quantum Dot Corp. (Hayward Calif.; now owned by Invitrogen) or from Evident Technologies (Troy, N.Y.). For example, QDs having peak emission wavelengths of approximately 525, 535, 545, 565, 585, 605, 655, 705, and 800 nm are available. Thus the QDs can have a range of different colors across the visible portion of the spectrum and in some cases even beyond.

[0168] Suitable radioisotopes can include, but are not limited to ¹⁴C, ³H, ³²P, ³³P, ³⁵S, and ¹²⁵I.

[0169] As used herein, “genetically modified cell” can generally refer to a cell that has been genetically modified. Some non-limiting examples of genetic modifications can include: insertions, deletions, inversions, translocations, gene fusions, or changing one or more nucleotides. A genetically modified cell can comprise a target nucleic acid with an introduced double strand break (e.g., DNA break). A genetically modified cell can comprise an exogenously introduced nucleic acid (e.g., a vector). A genetically modified cell can comprise an exogenously introduced polypeptide of the disclosure and/or nucleic acid of the disclosure. A genetically modified cell can comprise a donor polynucleotide. A genetically modified cell can comprise an exogenous nucleic acid integrated into the genome of the genetically modified cell. A genetically modified cell can comprise a deletion of DNA. A genetically modified cell can also refer to a cell with modified mitochondrial or chloroplast DNA.

[0170] As used herein, “genome engineering” can refer to a process of modifying a target nucleic acid. Genome engineering can refer to the integration of non-native nucleic acid into native nucleic acid. Genome engineering can refer to the targeting of a site-directed polypeptide and a nucleic acid-targeting nucleic acid to a target nucleic acid, without an integration or a deletion of the target nucleic acid. Genome engineering can refer to the cleavage of a target nucleic acid, and the rejoining of the target nucleic acid without an integration of an exogenous sequence in the target nucleic acid, or a deletion in the target nucleic acid. The native nucleic acid can comprise a gene. The non-native nucleic acid can comprise a donor polynucleotide. In the methods of the disclosure, site-directed polypeptides (e.g., Cas9) can introduce double-stranded breaks in nucleic acid, (e.g. genomic DNA). The double-stranded break can stimulate a cell's endogenous DNA-repair pathways (e.g. homologous recombination (HR) and/or non-homologous end joining (NHEJ), or A-NHEJ (alternative non-homologous end-joining)). Mutations, deletions, alterations, and integrations of foreign, exogenous, and/or alternative nucleic acid can be introduced into the site of the double-stranded DNA break.

[0171] As used herein, the term “isolated” can refer to a nucleic acid or polypeptide that, by the hand of a human, exists apart from its native environment and is therefore not a product of nature. Isolated can mean substantially pure. An isolated nucleic acid or polypeptide can exist in a purified form and/or can exist in a non-native environment such as, for example, in a transgenic cell.

[0172] As used herein, “non-native” can refer to a nucleic acid or polypeptide sequence that is not found in a native nucleic acid or protein. Non-native can refer to affinity tags. Non-native can refer to fusions. Non-native can refer to a naturally occurring nucleic acid or polypeptide sequence that comprises mutations, insertions and/or deletions. A non-native sequence may exhibit and/or encode for an activity (e.g., enzymatic activity, methyltransferase activity, acetyltransferase activity, kinase activity, ubiquitinating activity, etc.) that can also be exhibited by the nucleic acid and/or polypeptide sequence to which the non-native sequence is fused. A non-native nucleic acid or polypeptide sequence may be linked to a naturally-occurring nucleic acid or polypeptide sequence (or a variant thereof) by genetic engineering to generate a chimeric nucleic acid and/or polypeptide sequence encoding a chimeric nucleic acid and/or polypeptide. A non-native sequence can refer to a 3′ hybridizing extension sequence.

[0173] As used herein, a “nucleic acid” can generally refer to a polynucleotide sequence, or fragment thereof. A nucleic acid can comprise nucleotides. A nucleic acid can be exogenous or endogenous to a cell. A nucleic acid can exist in a cell-free environment. A nucleic acid can be a gene or fragment thereof. A nucleic acid can be DNA. A nucleic acid can be RNA. A nucleic acid can comprise one or more analogs (e.g. altered backbone, sugar, or nucleobase). Some non-limiting examples of analogs include: 5-bromouracil, peptide nucleic acid, xeno nucleic acid, morpholinos, locked nucleic acids, glycol nucleic acids, threose nucleic acids, dideoxynucleotides, cordycepin, 7-deaza-GTP, florophores (e.g. rhodamine or flurescein linked to the sugar), thiol containing nucleotides, biotin linked nucleotides, fluorescent base analogs, CpG islands, methyl-7-guanosine, methylated nucleotides, inosine, thiouridine, pseudourdine, dihydrouridine, queuosine, and wyosinc.

[0174] As used herein, a “nucleic acid sample” can generally refer to a sample from a biological entity. A nucleic acid sample can comprise nucleic acid. The nucleic acid from the nucleic acid sample can be purified and/or enriched. The nucleic acid sample may show the nature of the whole. Nucleic acid samples can come from various sources. Nucleic acid samples can come from one or more individuals. One or more nucleic acid samples can come from the same individual. One non-limiting example would be if one sample came from an individual's blood and a second sample came from an individual's tumor biopsy. Examples of nucleic acid samples can include but are not limited to, blood, serum, plasma, nasal swab or nasopharyngeal wash, saliva, urine, gastric fluid, spinal fluid, tears, stool, mucus, sweat, earwax, oil, glandular secretion, cerebral spinal fluid, tissue, semen, vaginal fluid, interstitial fluids, including interstitial fluids derived from tumor tissue, ocular fluids, spinal fluid, throat swab, check swab, breath, hair, finger nails, skin, biopsy, placental fluid, amniotic fluid, cord blood, emphatic fluids, cavity fluids, sputum, pus, micropiota, meconium, breast milk, buccal samples, nasopharyngeal wash, other excretions, or any combination thereof. Nucleic acid samples can originate from tissues. Examples of tissue samples may include but are not limited to, connective tissue, muscle tissue, nervous tissue, epithelial tissue, cartilage, cancerous or tumor sample, bone marrow, or bone. The nucleic acid sample may be provided from a human or animal. The nucleic acid sample may be provided from a mammal, vertebrate, such as murines, simians, humans, farm animals, sport animals, or pets. The nucleic acid sample may be collected from a living or dead subject. The nucleic acid sample may be collected fresh from a subject or may have undergone some form of pre-processing, storage, or transport.

[0175] A nucleic acid sample can comprise a target nucleic acid. A nucleic acid sample can originate from cell lysate. The cell lysate can originate from a cell.

[0176] As used herein, “nucleic acid-targeting nucleic acid” can refer to a nucleic acid that can hybridize to another nucleic acid. A nucleic acid-targeting nucleic acid can be RNA. A nucleic acid-targeting nucleic acid can be DNA. The nucleic acid-targeting nucleic acid can be programmed to bind to a sequence of nucleic acid site-specifically. The nucleic acid to be targeted, or the target nucleic acid, can comprise nucleotides. The nucleic acid-targeting nucleic acid can comprise nucleotides. A portion of the target nucleic acid can be complementary to a portion of the nucleic acid-targeting nucleic acid. A nucleic acid-targeting nucleic acid can comprise a polynucleotide chain and can be called a “single guide nucleic acid” (i.e. a “single guide nucleic acid-targeting nucleic acid”). A nucleic acid-targeting nucleic acid can comprise two polynucleotide chains and can be called a “double guide nucleic acid” (i.e. a “double guide nucleic acid-targeting nucleic acid”). If not otherwise specified, the term “nucleic acid-targeting nucleic acid” can be inclusive, referring to both single guide nucleic acids and double guide nucleic acids.

[0177] A nucleic acid-targeting nucleic acid can comprise a segment that can be referred to as a “nucleic acid-targeting segment” or a “nucleic acid-targeting sequence,” A nucleic acid-targeting nucleic acid can comprise a segment that can be referred to as a “protein binding segment” or “protein binding sequence.”

[0178] A nucleic acid-targeting nucleic acid can comprise one or more modifications (e.g., a base modification, a backbone modification), to provide the nucleic acid with a new or enhanced feature (e.g., improved stability). A nucleic acid-targeting nucleic acid can comprise a nucleic acid affinity tag. A nucleoside can be a base-sugar combination. The base portion of the nucleoside can be a heterocyclic base. The two most common classes of such heterocyclic bases are the purines and the pyrimidines. Nucleotides can be nucleosides that further include a phosphate group covalently linked to the sugar portion of the nucleoside. For those nucleosides that include a pentofuranosyl sugar, the phosphate group can be linked to the 2′, the 3′, or the 5′ hydroxyl moiety of the sugar. In forming nucleic acid-targeting nucleic acids, the phosphate groups can covalently link adjacent nucleosides to one another to form a linear polymeric compound. In turn, the respective ends of this linear polymeric compound can be further joined to form a circular compound; however, linear compounds are generally suitable. In addition, linear compounds may have internal nucleotide base complementarity and may therefore fold in a manner as to produce a fully or partially double-stranded compound. Within nucleic acid-targeting nucleic acids, the phosphate groups can commonly be referred to as forming the internucleoside backbone of the nucleic acid-targeting nucleic acid. The linkage or backbone of the nucleic acid-targeting nucleic acid can be a 3′ to 5′ phosphodiester linkage.

[0179] A nucleic acid-targeting nucleic acid can comprise a modified backbone and/or modified internucleoside linkages. Modified backbones can include those that retain a phosphorus atom in the backbone and those that do not have a phosphorus atom in the backbone.

[0180] Suitable modified nucleic acid-targeting nucleic acid backbones containing a phosphorus atom therein can include, for example, phosphorothioates, chiral phosphorothioates, phosphorodithioates, phosphotriesters, aminoalkylphosphotriesters, methyl and other alkyl phosphonates such as 3′-alkylene phosphonates, 5′-alkylene phosphonates, chiral phosphonates, phosphinates, phosphoramidates including 3′-amino phosphoramidate and aminoalkylphosphoramidates, phosphorodiamidates, thionophosphoramidates, thionoalkylphosphonates, thionoalkylphosphotriesters, selenophosphates, and boranophosphates having normal 3′-5′ linkages, 2′-5′ linked analogs, and those having inverted polarity wherein one or more internucleotide linkages is a 3′ to 3′, a 5′ to 5′ or a 2′ to 2′ linkage. Suitable nucleic acid-targeting nucleic acids having inverted polarity can comprise a single 3′ to 3′ linkage at the 3′-most internucleotide linkage (i.e. a single inverted nucleoside residue in which the nucleobase is missing or has a hydroxyl group in place thereof). Various salts (e.g., potassium chloride or sodium chloride), mixed salts, and free acid forms can also be included.

[0181] A nucleic acid-targeting nucleic acid can comprise one or more phosphorothioate and/or heteroatom internucleoside linkages, in particular —CH₂—NH—O—CH₂—, —CH₂—N(CH₃)—O—CH₂— (i.e. a methylene(methylimino) or MMI backbone), —CH₂—O—N(CH₃)—CH₂—, —CH₂—N(CH₃)—N(CH₃)—CH₂— and —O—N(CH₃)—CH₂—CH₂— (wherein the native phosphodiester internucleotide linkage is represented as —O—P(═O)(OH)—O—CH₂—).

[0182] A nucleic acid-targeting nucleic acid can comprise a morpholino backbone structure. For example, a nucleic acid can comprise a 6-membered morpholino ring in place of a ribose ring. In some of these embodiments, a phosphorodiamidate or other non-phosphodiester internucleoside linkage can replace a phosphodiester linkage.

[0183] A nucleic acid-targeting nucleic acid can comprise polynucleotide backbones that are formed by short chain alkyl or cycloalkyl internucleoside linkages, mixed heteroatom and alkyl or cycloalkyl internucleoside linkages, or one or more short chain heteroatomic or heterocyclic internucleoside linkages. These can include those having morpholino linkages (formed in part from the sugar portion of a nucleoside); siloxane backbones; sulfide, sulfoxide and sulfone backbones; formacetyl and thioformacetyl backbones; methylene formacetyl and thioformacetyl backbones; riboacetyl backbones; alkene containing backbones; sulfamate backbones; methyleneimino and methylenehydrazino backbones; sulfonate and sulfonamide backbones; amide backbones; and others having mixed N, O, S and CH₂ component parts.

[0184] A nucleic acid-targeting nucleic acid can comprise a nucleic acid mimetic. The term “mimetic” can be intended to include polynucleotides wherein only the furanose ring or both the furanose ring and the internucleotide linkage are replaced with non-furanose groups, replacement of only the furanose ring can also be referred as being a sugar surrogate. The heterocyclic base moiety or a modified heterocyclic base moiety can be maintained for hybridization with an appropriate target nucleic acid. One such nucleic acid can be a peptide nucleic acid (PNA). In a PNA, the sugar-backbone of a polynucleotide can be replaced with an amide containing backbone, in particular an aminoethylglycine backbone. The nucleotides can be retained and are bound directly or indirectly to aza nitrogen atoms of the amide portion of the backbone. The backbone in PNA compounds can comprise two or more linked aminoethylglycine units which gives PNA an amide containing backbone. The heterocyclic base moieties can be bound directly or indirectly to aza nitrogen atoms of the amide portion of the backbone.

[0185] A nucleic acid-targeting nucleic acid can comprise linked morpholino units (i.e. morpholino nucleic acid) having heterocyclic bases attached to the morpholino ring. Linking groups can link the morpholino monomeric units in a morpholino nucleic acid. Non-ionic morpholino-based oligomeric compounds can have less undesired interactions with cellular proteins. Morpholino-based polynucleotides can be nonionic mimics of nucleic acid-targeting nucleic acids. A variety of compounds within the morpholino class can be joined using different linking groups. A further class of polynucleotide mimetic can be referred to as cyclohexenyl nucleic acids (CeNA). The furanose ring normally present in a nucleic acid molecule can be replaced with a cyclohexenyl ring. CeNA DMT protected phosphoramidite monomers can be prepared and used for oligomeric compound synthesis using phosphoramidite chemistry. The incorporation of CeNA monomers into a nucleic acid chain can increase the stability of a DNA/RNA hybrid. CeNA oligoadenylates can form complexes with nucleic acid complements with similar stability to the native complexes. A further modification can include Locked Nucleic Acids (LNAs) in which the 2′-hydroxyl group is linked to the 4′ carbon atom of the sugar ring thereby forming a 2′-C,4′-C-oxymethylene linkage thereby forming a bicyclic sugar moiety. The linkage can be a methylene (—CH2—), group bridging the 2′ oxygen atom and the 4′ carbon atom wherein n is 1 or 2. LNA and LNA analogs can display very high duplex thermal stabilities with complementary nucleic acid (Tm=+3 to +10° C.), stability towards 3′-exonucleolytic degradation and good solubility properties.

[0186] A nucleic acid-targeting nucleic acid can comprise one or more substituted sugar moieties. Suitable polynucleotides can comprise a sugar substituent group selected from: OH; F; O-, S-, or N-alkyl; O—, S-, or N-alkenyl; O—, S- or N-alkynyl; or O-alkyl-O-alkyl, wherein the alkyl, alkenyl and alkynyl may be substituted or unsubstituted C₁ to C₁₀ alkyl or C₂ to C10 alkenyl and alkynyl. Particularly suitable are O((CH₂)ₙO) mCH₃, O(CH₂)ₙOCH₃, O(CH₂)ₙNH₂, O(CH₂)ₙCH₃, O(CH₂)ₙONH₂, and O(CH₂)ₙON ((CH₂)ₙCH₃)₂, where n and m are from 1 to about 10. A sugar substituent group can be selected from: C₁ to C₁₀ lower alkyl, substituted lower alkyl, alkenyl, alkynyl, alkaryl, aralkyl, O-alkaryl or O-aralkyl, SH, SCH₃, OCN, Cl, Br, CN, CF₃, OCF₃, SOCH₃, SO₂CH₃, ONO₂, N₃, NH₂, heterocycloalkyl, heterocycloalkaryl, aminoalkylamino, polyalkylamino, substituted silyl, an RNA cleaving group, a reporter group, an intercalator, a group for improving the pharmacokinetic properties of an nucleic acid-targeting nucleic acid, or a group for improving the pharmacodynamic properties of an nucleic acid-targeting nucleic acid, and other substituents having similar properties. A suitable modification can include 2′-methoxyethoxy (2′—O—CH₂ CH₂OCH₃, also known as 2′-O-(2-methoxyethyl) or 2′-MOE i.e., an alkoxyalkoxy group). A further suitable modification can include 2′-dimethylaminooxyethoxy, (i.e., a O(CH₂)₂ON(CH₃)₂ group, also known as 2′-DMAOE), and 2′-dimethylaminoethoxyethoxy (also known as 2′-O-dimethyl-amino-ethoxy-ethyl or 2′-DMAEOE), i.e., 2′—O—CH2—O—CH₂—N(CH₃)₂.

[0187] Other suitable sugar substituent groups can include methoxy (—O—CH3), aminopropoxy (—O CH₂ CH₂ CH₂NH₂), allyl (—CH₂—CH═CH₂), —O-allyl (—O—CH₂—CH═CH₂) and fluoro (F). 2′-sugar substituent groups may be in the arabino (up) position or ribo (down) position. A suitable 2′-arabino modification is 2′-F. Similar modifications may also be made at other positions on the oligomeric compound, particularly the 3′ position of the sugar on the 3′ terminal nucleoside or in 2′-5′ linked nucleotides and the 5′ position of 5′ terminal nucleotide. Oligomeric compounds may also have sugar mimetics such as cyclobutyl moieties in place of the pentofuranosyl sugar.

[0188] A nucleic acid-targeting nucleic acid may also include nucleobase (often referred to simply as “base”) modifications or substitutions. As used herein, “unmodified” or “natural” nucleobases can include the purine bases, (e.g. adenine (A) and guanine (G)), and the pyrimidine bases, (e.g. thymine (T), cytosine (C) and uracil (U)). Modified nucleobases can include other synthetic and natural nucleobases such as 5-methylcytosine (5-me-C), 5-hydroxymethyl cytosine, xanthine, hypoxanthine, 2-aminoadenine, 6-methyl and other alkyl derivatives of adenine and guanine, 2-propyl and other alkyl derivatives of adenine and guanine, 2-thiouracil, 2-thiothymine and 2-thiocytosine, 5-halouracil and cytosine, 5-propynyl (—C═C—CH3) uracil and cytosine and other alkynyl derivatives of pyrimidine bases, 6-azo uracil, cytosine and thymine, 5-uracil (pseudouracil), 4-thiouracil, 8-halo, 8-amino, 8-thiol, 8-thioalkyl, 8-hydroxyl and other 8-substituted adenines and guanines, 5-halo particularly 5-bromo, 5-trifluoromethyl and other 5-substituted uracils and cytosines, 7-methylguanine and 7-methyladenine, 2-F-adenine, 2-aminoadenine, 8-azaguanine and 8-azaadenine, 7-deazaguanine and 7-deazaadenine and 3-deazaguanine and 3-deazaadenine. Modified nucleobases can include tricyclic pyrimidines such as phenoxazine cytidine (1H-pyrimido (5,4-b) (1,4)benzoxazin-2 (3H)-one), phenothiazine cytidine (1H-pyrimido (5,4-b) (1,4)benzothiazin-2 (3H)-one), G-clamps such as a substituted phenoxazine cytidine (e.g. 9-(2-aminocthoxy)-H-pyrimido (5,4-(b) (1,4)benzoxazin-2 (3H)-one), carbazole cytidine (2H-pyrimido (4,5-b) indol-2-one), pyridoindole cytidine (Hpyrido (3′,2′: 4,5) pyrrolo (2,3-d)pyrimidin-2-one).

[0189] Heterocyclic base moieties can include those in which the purine or pyrimidine base is replaced with other heterocycles, for example 7-deaza-adenine, 7-deazaguanosine, 2-aminopyridine and 2-pyridone. Nucleobases can be useful for increasing the binding affinity of a polynucleotide compound. These can include 5-substituted pyrimidines, 6-azapyrimidines and N-2, N-6 and O-6 substituted purines, including 2-aminopropyladenine, 5-propynyluracil and 5-propynylcytosine. 5-methylcytosine substitutions can increase nucleic acid duplex stability by 0.6-1.2° C. and can be suitable base substitutions (e.g., when combined with 2′-O-methoxyethyl sugar modifications).

[0190] A modification of a nucleic acid-targeting nucleic acid can comprise chemically linking to the nucleic acid-targeting nucleic acid one or more moieties or conjugates that can enhance the activity, cellular distribution or cellular uptake of the nucleic acid-targeting nucleic acid. These moieties or conjugates can include conjugate groups covalently bound to functional groups such as primary or secondary hydroxyl groups. Conjugate groups can include, but are not limited to, intercalators, reporter molecules, polyamines, polyamides, polyethylene glycols, polyethers, groups that enhance the pharmacodynamic properties of oligomers, and groups that can enhance the pharmacokinetic properties of oligomers. Conjugate groups can include, but are not limited to, cholesterols, lipids, phospholipids, biotin, phenazine, folate, phenanthridine, anthraquinone, acridine, fluoresceins, rhodamines, coumarins, and dyes. Groups that enhance the pharmacodynamic properties include groups that improve uptake, enhance resistance to degradation, and/or strengthen sequence-specific hybridization with the target nucleic acid. Groups that can enhance the pharmacokinetic properties include groups that improve uptake, distribution, metabolism or excretion of a nucleic acid. Conjugate moieties can include but are not limited to lipid moieties such as a cholesterol moiety, cholic acid a thioether, (e.g., hexyl-S-tritylthiol), a thiocholesterol, an aliphatic chain (e.g., dodecandiol or undecyl residues), a phospholipid (e.g., di-hexadecyl-rac-glycerol or tricthylammonium 1,2-di-O-hexadecyl-rac-glycero-3-H-phosphonate), a polyamine or a polyethylene glycol chain, or adamantane acetic acid, a palmityl moiety, or an octadecylamine or hexylamino-carbonyl-oxycholesterol moiety.

[0191] A modification may include a “Protein Transduction Domain” or PTD (i.e. a cell penetrating peptide (CPP)). The PTD can refer to a polypeptide, polynucleotide, carbohydrate, or organic or inorganic compound that facilitates traversing a lipid bilayer, micelle, cell membrane, organelle membrane, or vesicle membrane. A PTD can be attached to another molecule, which can range from a small polar molecule to a large macromolecule and/or a nanoparticle, and can facilitate the molecule traversing a membrane, for example going from extracellular space to intracellular space, or cytosol to within an organelle. A PTD can be covalently linked to the amino terminus of a polypeptide. A PTD can be covalently linked to the carboxyl terminus of a polypeptide. A PTD can be covalently linked to a nucleic acid. Exemplary PTDs can include, but are not limited to, a minimal peptide protein transduction domain; a polyarginine sequence comprising a number of arginines sufficient to direct entry into a cell (e.g., 3, 4, 5, 6, 7, 8, 9, 10, or 10-50 arginines), a VP22 domain, a Drosophila Antennapedia protein transduction domain, a truncated human calcitonin peptide, polylysine, and transportan, arginine homopolymer of from 3 arginine residues to 50 arginine residues. The PTD can be an activatable CPP (ACPP). ACPPs can comprise a polycationic CPP (e.g., Arg9 or “R9”) connected via a cleavable linker to a matching polyanion (e.g., Glu9 or “E9”), which can reduce the net charge to nearly zero and thereby inhibits adhesion and uptake into cells. Upon cleavage of the linker, the polyanion can be released, locally unmasking the polyarginine and its inherent adhesiveness, thus “activating” the ACPP to traverse the membrane.

[0192] “Nucleotide” can generally refer to a base-sugar-phosphate combination. A nucleotide can comprise a synthetic nucleotide. A nucleotide can comprise a synthetic nucleotide analog. Nucleotides can be monomeric units of a nucleic acid sequence (e.g. deoxyribonucleic acid (DNA) and ribonucleic acid (RNA)). The term nucleotide can include ribonucleoside triphosphates adenosine triphosphate (ATP), uridine triphosphate (UTP), cytosine triphosphate (CTP), guanosine triphosphate (GTP) and deoxyribonucleoside triphosphates such as dATP, dCTP, dITP, dUTP, dGTP, dTTP, or derivatives thereof. Such derivatives can include, for example, [αS] dATP, 7-deaza-dGTP and 7-deaza-dATP, and nucleotide derivatives that confer nuclease resistance on the nucleic acid molecule containing them. The term nucleotide as used herein can refer to dideoxyribonucleoside triphosphates (ddNTPs) and their derivatives. Illustrative examples of dideoxyribonucleoside triphosphates can include, but are not limited to, ddATP, ddCTP, ddGTP, ddITP, and ddTTP. A nucleotide may be unlabeled or detectably labeled by well-known techniques. Labeling can also be carried out with quantum dots. Detectable labels can include, for example, radioactive isotopes, fluorescent labels, chemiluminescent labels, bioluminescent labels and enzyme labels. Fluorescent labels of nucleotides may include but are not limited fluorescein, 5-carboxyfluorescein (FAM), 2′7′-dimethoxy-4′5-dichloro-6-carboxyfluorescein (JOE), rhodaminc, 6-carboxyrhodamine (R6G), N,N,N′, N′-tetramethyl-6-carboxyrhodaminc (TAMRA), 6-carboxy-X-rhodamine (ROX), 4-(4′dimethylaminophenylazo)benzoic acid (DABCYL), Cascade Blue, Oregon Green, Texas Red, Cyanine and 5-(2′-aminoethyl)aminonaphthalene-1-sulfonic acid (EDANS). Specific examples of fluorescently labeled nucleotides can include [R6G] dUTP, [TAMRA|dUTP, [R110] dCTP, [R6G] dCTP, [TAMRA|dCTP, [JOE] ddATP, [R6G] ddATP, [FAM] ddCTP, [R110] ddCTP, [TAMRA] ddGTP, [ROX] ddTTP, [dR6G] ddATP, [dR110] ddCTP, [dTAMRA|ddGTP, and [dROX] ddTTP available from Perkin Elmer, Foster City, Calif. FluoroLink DeoxyNucleotides, FluoroLink Cy3-dCTP, FluoroLink Cy5-dCTP, FluoroLink Fluor X-dCTP, FluoroLink Cy3-dUTP, and FluoroLink Cy5-dUTP available from Amersham, Arlington Heights, Ill.; Fluorescein-15-dATP, Fluorescein-12-dUTP, Tetramethyl-rodamine-6-dUTP, IR770-9-dATP, Fluorescein-12-ddUTP, Fluorescein-12-UTP, and Fluorescein-15-2′-dATP available from Bochringer Mannheim, Indianapolis, Ind.; and Chromosome Labeled Nucleotides, BODIPY-FL-14-UTP, BODIPY-FL-4-UTP, BODIPY-TMR-14-UTP, BODIPY-TMR-14-dUTP, BODIPY-TR-14-UTP, BODIPY-TR-14-dUTP, Cascade Blue-7-UTP, Cascade Blue-7-dUTP, fluorescein-12-UTP, fluorescein-12-dUTP, Oregon Green 488-5-dUTP, Rhodamine Green-5-UTP, Rhodamine Green-5-dUTP, tetramethylrhodamine-6-UTP, tetramethylrhodamine-6-dUTP, Texas Red-5-UTP, Texas Red-5-dUTP, and Texas Red-12-dUTP available from Molecular Probes, Eugene, Oreg. Nucleotides can also be labeled or marked by chemical modification. A chemically-modified single nucleotide can be biotin-dNTP. Some non-limiting examples of biotinylated dNTPs can include, biotin-dATP (e.g., bio-N6-ddATP, biotin-14-dATP), biotin-dCTP (e.g., biotin-11-dCTP, biotin-14-dCTP), and biotin-dUTP (e.g. biotin-11-dUTP, biotin-16-dUTP, biotin-20-dUTP).

[0193] As used herein, “P-domain” can refer to a region in a nucleic acid-targeting nucleic acid. The P-domain can interact with a protospacer adjacent motif (PAM), site-directed polypeptide, and/or nucleic acid-targeting nucleic acid. A P-domain can interact directly or indirectly with a protospacer adjacent motif (PAM), site-directed polypeptide, and/or nucleic acid-targeting nucleic acid nucleic acid. As used herein, the terms “PAM interacting region” “anti-repeat adjacent region” and “P-domain” can be used interchangeably.

[0194] As used here, “purified” can refer to a molecule (e.g., site-directed polypeptide, nucleic acid-targeting nucleic acid) that comprises at least 50, 60, 70, 80, 90, 95, 96, 97, 98, 99, or 100% of the composition. For example, a sample that comprises 10% of a site-directed polypeptide, but after a purification step comprises 60% of the site-directed polypeptide, then the sample can be said to be purified. A purified sample can refer to an enriched sample, or a sample that has undergone methods to remove particles other than the particle of interest.

[0195] As used herein, “reactivation agent” can generally refer to any agent that can convert an enzymatically inactive polypeptide into an enzymatically active polypeptide. Imidazole can be a reactivation agent. A ligand analogue can be a reactivation agent.

[0196] As used herein, “recombinant” can refer to sequence that originates from a source foreign to the particular host (e.g., cell) or, if from the same source, is modified from its original form. A recombinant nucleic acid in a cell can include a nucleic acid that is endogenous to the particular cell but has been modified through, for example, the use of site-directed mutagenesis. The term can include non-naturally occurring multiple copies of a naturally occurring DNA sequence. Thus, the term can refer to a nucleic acid that is foreign or heterologous to the cell, or homologous to the cell but in a position or form within the cell in which the nucleic acid is not ordinarily found. Similarly, when used in the context of a polypeptide or amino acid sequence, an exogenous polypeptide or amino acid sequence can be a polypeptide or amino acid sequence that originates from a source foreign to the particular cell or, if from the same source, is modified from its original form.

[0197] As used herein, “site-directed polypeptides” can generally refer to nucleases, site-directed nucleases, endoribonucleases, conditionally enzymatically inactive endoribonucleases, Argonauts, and nucleic acid-binding proteins. A site-directed polypeptide or protein can include nucleases such as homing endonucleases such as PI-TliII, H-Drel, I-Dmol and I-Crel, I-Scel, LAGLIDADG family nucleases, meganucleases, GIY-YIG family nucleases, His-Cys box family nucleases, Vsr-like nucleases, endoribonucleases, exoribonucleases, endonucleases, and exonucleases. A site-directed polypeptide can refer to a Cas gene member of the Type I, Type II, Type III, and/or Type U CRISPR/Cas systems. A site-directed polypeptide can refer to a member of the Repeat Associated Mysterious Protein (RAMP) superfamily (e.g., Cas5, Cas6 subfamilies). A site-directed polypeptide can refer to an Argonaute protein.

[0198] A site-directed polypeptide can be a type of protein. A site-directed polypeptide can refer to an nuclease. A site-directed polypeptide can refer to an endoribonuclease. A site-directed polypeptide can refer to any modified (e.g., shortened, mutated, lengthened) polypeptide sequence or homologue of the site-directed polypeptide. A site-directed polypeptide can be codon optimized. A site-directed polypeptide can be a codon-optimized homologue of a site-directed polypeptide. A site-directed polypeptide can be enzymatically inactive, partially active, constitutively active, fully active, inducible active and/or more active, (e.g. more than the wild type homologue of the protein or polypeptide). A site-directed polypeptide can be Cas9. A site-directed polypeptide can be Csy4. A site-directed polypeptide can be Cas5 or a Cas5 family member. A site-directed polypeptide can be Cas6 or a Cas6 family member.

[0199] In some instances, the site-directed polypeptide (e.g., variant, mutated, enzymatically inactive and/or conditionally enzymatically inactive site-directed polypeptide) can target nucleic acid. The site-directed polypeptide (e.g., variant, mutated, enzymatically inactive and/or conditionally enzymatically inactive endoribonuclease) can target RNA. Endoribonucleases that can target RNA can include members of other CRISPR subfamilies such as Cas6 and Cas5.

[0200] As used herein, the term “specific” can refer to interaction of two molecules where one of the molecules through, for example chemical or physical means, specifically binds to the second molecule. Exemplary specific binding interactions can refer to antigen-antibody binding, avidin-biotin binding, carbohydrates and lectins, complementary nucleic acid sequences (e.g., hybridizing), complementary peptide sequences including those formed by recombinant methods, effector and receptor molecules, enzyme cofactors and enzymes, enzyme inhibitors and enzymes, and the like. “Non-specific” can refer to an interaction between two molecules that is not specific.

[0201] As used herein, “solid support” can generally refer to any insoluble, or partially soluble material. A solid support can refer to a test strip, a multi-well dish, and the like. The solid support can comprise a variety of substances (e.g., glass, polystyrene, polyvinyl chloride, polypropylene, polyethylene, polycarbonate, dextran, nylon, amylose, natural and modified celluloses, polyacrylamides, agaroses, and magnetite) and can be provided in a variety of forms, including agarose beads, polystyrene beads, latex beads, magnetic beads, colloid metal particles, glass and/or silicon chips and surfaces, nitrocellulose strips, nylon membranes, sheets, wells of reaction trays (e.g., multi-well plates), plastic tubes, etc. A solid support can be solid, semisolid, a bead, or a surface. The support can mobile in a solution or can be immobile. A solid support can be used to capture a polypeptide. A solid support can comprise a capture agent.

[0202] As used herein, “target nucleic acid” can generally refer to a nucleic acid to be used in the methods of the disclosure. A target nucleic acid can refer to a chromosomal sequence or an extrachromosomal sequence, (e.g. an episomal sequence, a minicircle sequence, a mitochondrial sequence, a chloroplast sequence, etc.). A target nucleic acid can be DNA. A target nucleic acid can be RNA. A target nucleic acid can herein be used interchangeably with “polynucleotide”, “nucleotide sequence”, and/or “target polynucleotide”. A target nucleic acid can be a nucleic acid sequence that may not be related to any other sequence in a nucleic acid sample by a single nucleotide substitution. A target nucleic acid can be a nucleic acid sequence that may not be related to any other sequence in a nucleic acid sample by a 2, 3, 4, 5, 6, 7, 8, 9, or 10 nucleotide substitutions. In some embodiments, the substitution cannot occur within 5, 10, 15, 20, 25, 30, or 35 nucleotides of the 5′ end of a target nucleic acid. In some embodiments, the substitution cannot occur within 5, 10, 15, 20, 25, 30, 35 nucleotides of the 3′ end of a target nucleic acid.

[0203] As used herein, “tracrRNA” can generally refer to a nucleic acid with at least about 5%, 10%, 20%, 30%, 40%, 50%, 60%, 70%, 80%, 90%, 100% sequence identity and/or sequence similarity to a wild type exemplary tracrRNA sequence (e.g., a tracrRNA from S. pyogenes (SEQ ID 433), SEQ IDs 431-562). tracrRNA can refer to a nucleic acid with at most about 5%, 10%, 20%, 30%, 40%, 50%, 60%, 70%, 80%, 90%, 100% sequence identity and/or sequence similarity to a wild type exemplary tracrRNA sequence (e.g., a tracrRNA from S. pyogenes). tracrRNA can refer to a modified form of a tracrRNA that can comprise an nucleotide change such as a deletion, insertion, or substitution, variant, mutation, or chimera. A tracrRNA can refer to a nucleic acid that can be at least about 60% identical to a wild type exemplary tracrRNA (e.g., a tracrRNA from S. pyogenes) sequence over a stretch of at least 6 contiguous nucleotides. For example, a tracrRNA sequence can be at least about 60% identical, at least about 65% identical, at least about 70% identical, at least about 75% identical, at least about 80% identical, at least about 85% identical, at least about 90% identical, at least about 95% identical, at least about 98% identical, at least about 99% identical, or 100% identical, to a wild type exemplary tracrRNA (e.g., a tracrRNA from S. pyogenes) sequence over a stretch of at least 6 contiguous nucleotides. A tracrRNA can refer to a mid-tracrRNA. A tracrRNA can refer to a minimum tracrRNA sequence.

### CRISPR Systems

[0204] A CRISPR (Clustered Regularly Interspaced Short Palindromic Repeats) can be a genomic locus found in the genomes of many prokaryotes (e.g., bacteria and archaea). CRISPR loci can provide resistance to foreign invaders (e.g., virus, phage) in prokaryotes. In this way, the CRISPR system can be thought to function as a type of immune system to help defend prokaryotes against foreign invaders. There can be three stages of CRISPR locus function: integration of new sequences into the locus, biogenesis of CRISPR RNA (crRNA), and silencing of foreign invader nucleic acid. There can be four types of CRISPR systems (e.g., Type I, Type II, Type III, TypeU).

[0205] A CRISPR locus can include a number of short repeating sequences referred to as “repeats.” Repeats can form hairpin structures and/or repeats can be unstructured single-stranded sequences. The repeats can occur in clusters. Repeats sequences can frequently diverge between species. Repeats can be regularly interspaced with unique intervening sequences referred to as “spacers,” resulting in a repeat-spacer-repeat locus architecture. Spacers can be identical to or have high homology with known foreign invader sequences. A spacer-repeat unit can encode a crisprRNA (crRNA). A crRNA can refer to the mature form of the spacer-repeat unit. A crRNA can comprise a “seed” sequence that can be involved in targeting a target nucleic acid (e.g., possibly as a surveillance mechanism against foreign nucleic acid). A seed sequence can be located at the 5′ or 3′ end of the crRNA.

[0206] A CRISPR locus can comprise polynucleotide sequences encoding for Crispr Associated Genes (Cas) genes. Cas genes can be involved in the biogenesis and/or the interference stages of crRNA function. Cas genes can display extreme sequence (e.g., primary sequence)divergence between species and homologues. For example, Cas1 homologues can comprise less than 10% primary sequence identity between homologues. Some Cas genes can comprise homologous secondary and/or tertiary structures. For example, despite extreme sequence divergence, many members of the Cas6 family of CRISPR proteins comprise a N-terminal ferredoxin-like fold. Cas genes can be named according to the organism from which they are derived. For example, Cas genes in Staphylococcus epidermidis can be referred to as Csm-type, Cas genes in Streptococcus thermophilus can be referred to as Csn-type, and Cas genes in Pyrococcus furiosus can be referred to as Cmr-type.

### Integration

[0207] The integration stage of CRISPR system can refer to the ability of the CRISPR locus to integrate new spacers into the crRNA array upon being infected by a foreign invader. Acquisition of the foreign invader spacers can help confer immunity to subsequent attacks by the same foreign invader. Integration can occur at the leader end of the CRISPR locus. Cas proteins (e.g., Cas1 and Cas2) can be involved in integration of new spacer sequences. Integration can proceed similarly for some types of CRISPR systems (e.g., Type I-III).

### Biogenesis

[0208] Mature crRNAs can be processed from a longer polycistronic CRISPR locus transcript (i.e., pre-crRNA array). A pre-crRNA array can comprise a plurality of crRNAs. The repeats in the pre-crRNA array can be recognized by Cas genes. Cas genes can bind to the repeats and cleave the repeats. This action can liberate the plurality of crRNAs. crRNAs can be subjected to further events to produce the mature crRNA form such as trimming (e.g., with an exonuclease). A crRNA may comprise all, some, or none of the CRISPR repeat sequence.

### Interference

[0209] Interference can refer to the stage in the CRISPR system that is functionally responsible for combating infection by a foreign invader. CRISPR interference can follow a similar mechanism to RNA interference (RNAi (e.g., wherein a target RNA is targeted (e.g., hybridized) by a short interfering RNA (siRNA)), which can result in target RNA degradation and/or destabilization. CRISPR systems can perform interference of a target nucleic acid by coupling crRNAs and Cas genes, thereby forming CRISPR ribonucleoproteins (crRNPs). crRNA of the crRNP can guide the crRNP to foreign invader nucleic acid, (e.g., by recognizing the foreign invader nucleic acid through hybridization). Hybridized target foreign invader nucleic acid-crRNA units can be subjected to cleavage by Cas proteins. Target nucleic acid interference may require a spacer adjacent motif (PAM) in a target nucleic acid.

### Types of CRISPR Systems

[0210] There can be four types of CRISPR systems: Type I, Type II, Type III, and Type U. More than one CRISPR type system can be found in an organism. CRISPR systems can be complementary to each other, and/or can lend functional units in trans to facilitate CRISPR locus processing.

### Type I CRISPR Systems

[0211] crRNA biogenesis in Type I CRISPR systems can comprise endoribonuclease cleavage of repeats in the pre-crRNA array, which can result in a plurality of crRNAs. crRNAs of Type I systems may not be subjected to crRNA trimming. A crRNA can be processed from a pre-crRNA array by a multi-protein complex called Cascade (originating from CRISPR-associated complex for antiviral defense). Cascade can comprise protein subunits (e.g, CasA-CasE). Some of the subunits can be members of the Repeat Associated Mysterious Protein (RAMP) superfamily (e.g., Cas5 and Cas6 families). The Cascade-crRNA complex (i.e., interference complex) can recognize target nucleic acid through hybridization of the crRNA with the target nucleic acid. The Cascade interference complex can recruit the Cas3 helicase/nuclease which can act in trans to facilitate cleavage of target nucleic acid. The Cas3 nuclease can cleave target nucleic acid (e.g., with its HD nuclease domain). Target nucleic acid in a Type I CRISPR system can comprise a PAM. Target nucleic acid in a Type I CRISPR system can be DNA.

[0212] Type I systems can be further subdivided by their species of origin. Type I systems can comprise: Types IA (Aeropyrum pernix or CASS5); IB (Thermotoga neapolitana-Haloarcula marismortui or CASS7); IC (Desulfovibrio vulgaris or CASS1); ID; IE (Escherichia coli or CASS2); and IF (Yersinia pestis or CASS3) subfamilies.

### Type II CRISPR Systems

[0213] crRNA biogenesis in a Type II CRISPR system can comprise a trans-activating CRISPR RNA (tracrRNA). A tracrRNA can be modified by endogenous RNaseIII. The tracrRNA of the complex can hybridize to a crRNA repeat in the pre-crRNA array. Endogenous RnaseIII can be recruited to cleave the pre-crRNA. Cleaved crRNAs can be subjected to exoribonuclease trimming to produce the mature crRNA form (e.g., 5′ trimming). The tracrRNA can remain hybridized to the crRNA. The tracrRNA and the crRNA can associate with a site-directed polypeptide (e.g., Cas9). The crRNA of the crRNA-tracrRNA-Cas9 complex can guide the complex to a target nucleic acid to which the crRNA can hybridize. Hybridization of the crRNA to the target nucleic acid can activate Cas9 for target nucleic acid cleavage. Target nucleic acid in a Type II CRISPR system can comprise a PAM. In some embodiments, a PAM is essential to facilitate binding of a site-directed polypeptide (e.g., Cas9) to a target nucleic acid. Type II systems can be further subdivided into II-A (Nmeni or CASS4) and II-B (Nmeni or CASS4).

### Type III CRISPR Systems

[0214] crRNA biogenesis in Type III CRISPR systems can comprise a step of endoribonuclease cleavage of repeats in the pre-crRNA array, which can result in a plurality of crRNAs. Repeats in the Type III CRISPR system can be unstructured single-stranded regions. Repeats can be recognized and cleaved by a member of the RAMP superfamily of endoribonucleases (e.g., Cas6). crRNAs of Type III (e.g., Type III-B) systems may be subjected to crRNA trimming (e.g., 3′ trimming). Type III systems can comprise a polymerase-like protein (e.g., Cas10). Cas10 can comprise a domain homologous to a palm domain.

[0215] Type III systems can process pre-crRNA with a complex comprising a plurality of RAMP superfamily member proteins and one or more CRISPR polymerase-like proteins. Type III systems can be divided into III-A and III-B. An interference complex of the Type III-A system (i.e., Csm complex) can target plasmid nucleic acid. Cleavage of the plasmid nucleic acid can occur with the HD nuclease domain of a polymerase-like protein in the complex. An interference complex of the Type III-B system (i.e., Cmr complex) can target RNA.

### Type U CRISPR Systems

[0216] Type U CRISPR systems may not comprise the signature genes of either of the Type I-III CRISPR systems (e.g., Cas3, Cas9, Cas6, Cas1, Cas2). Examples of Type U CRISPR Cas genes can include, but are not limited to, Csf1, Csf2, Csf3, Csf4. Type U Cas genes may be very distant homologues of Type I-III Cas genes. For example, Csf3 may be highly diverged but functionally similar to Cas5 family members. A Type U system may function complementarily in trans with a Type I-III system. In some instances, Type U systems may not be associated with processing CRISPR arrays. Type U systems may represent an alternative foreign invader defense system.

### Ramp Superfamily

[0217] Repeat Associated Mysterious Proteins (RAMP proteins) can be characterized by a protein fold comprising a βαββαβ [beta-alpha-beta-beta-alpha-beta] motif of β-strands (β) and α-helices (α). A RAMP protein can comprise an RNA recognition motif (RRM) (which can comprise a ferredoxin or ferredoxin-like fold). RAMP proteins can comprise an N-terminal RRM. The C-terminal domain of RAMP proteins can vary, but can also comprise an RRM. RAMP family members can recognize structured and/or unstructured nucleic acid. RAMP family members can recognize single-stranded and/or double-stranded nucleic acid. RAMP proteins can be involved in the biogenesis and/or the interference stage of CRISPR Type I and Type III systems. RAMP superfamily members can comprise members of the Cas7, Cas6, and Cas5 families. RAMP superfamily members can be endoribonucleases.

[0218] RRM domains in the RAMP superfamily can be extremely divergent. RRM domains can comprise at least about 5%, at least about 10%, at least about 15%, at least about 20%, at least about 25%, at least about 30%, at least about 35%, at least about 40%, at least about 45%, at least about 50%, at least about 55%, at least about 60%, at least about 65%, at least about 70%, at least about 75%, at least about 80%, at least about 85%, at least about 90%, at least about 95%, or 100% sequence or structural homology to a wild type exemplary RRM domain (e.g., an RRM domain from Cas7). RRM domains can comprise at most about 5%, at most about 10%, at most about 15%, at most about 20%, at most about 25%, at most about 30%, at most about 35%, at most about 40%, at most about 45%, at most about 50%, at most about 55%, at most about 60%, at most about 65%, at most about 70%, at most about 75%, at most about 80%, at most about 85%, at most about 90%, at most about 95%, or 100% sequence or structural homology to a wild type exemplary RRM domain (e.g., an RRM domain from Cas7).

### Cas7 Family

[0219] Cas7 family members can be a subclass of RAMP family proteins. Cas7 family proteins can be categorized in Type I CRISPR systems. Cas7 family members may not comprise a glycine rich loop that is familiar to some RAMP family members. Cas7 family members can comprise one RRM domain. Cas7 family members can include, but are not limited to, Cas7 (COG1857), Cas7 (COG3649), Cas7 (CT1975), Csy3, Csm3, Cmr6, Csm5, Cmr4, Cmr1, Csf2, and Csc2.

### Cas6 Family

[0220] The Cas6 family can be a RAMP subfamily. Cas6 family members can comprise two RNA recognition motif (RRM)-like domains. A Cas6 family member (e.g., Cas6f) can comprise a N-terminal RRM domain and a distinct C-terminal domain that may show weak sequence similarity or structural homology to an RRM domain. Cas6 family members can comprise a catalytic histidine that may be involved in endoribonuclease activity. A comparable motif can be found in Cas5 and Cas7 RAMP families. Cas6 family members can include, but are not limited to, Cas6, Cas6e, Cas6f (e.g., Csy4).

### Cas5 Family

[0221] The Cas5 family can be a RAMP subfamily. The Cas5 family can be divided into two subgroups: one subgroup that can comprise two RRM domains, and one subgroup that can comprise one RRM domain. Cas5 family members can include, but are not limited to, Csm4, Csx10, Cmr3, Cas5, Cas5 (BH0337), Csy2, Csc1, Csf3.

### Cas Genes

[0222] Exemplary CRISPR Cas genes can include Cas1, Cas2, Cas3′ (Cas3-prime), Cas3″ (Cas3-double prime), Cas4, Cas5, Cas6, Cas6e (formerly referred to as CasE, Cse3), Cas6f (i.e., Csy4), Cas7, Cas8a1, Cas8a2, Cas8b, Cas8c, Cas9, Cas10, Cas10d, Csy1, Csy2, Csy3, Cse1, Cse2, Csc1, Csc2, Csa5, Csn2, Csm2, Csm3, Csm4, Csm5, Csm6, Cmr1, Cmr3, Cmr4, Cmr5, Cmr6, Csb1, Csb2, Csb3, Csx17, Csx14, Csx10, Csx16, CsaX, Csx3, Csx1, Csx15, Csf1, Csf2, Csf3, Csf4. Table 1 provides an exemplary categorization of CRISPR Cas genes by CRISPR system type.

[0223] The CRISPR-Cas gene naming system has undergone extensive rewriting since the Cas genes were discovered. For the purposes of this application, Cas gene names used herein are based on the naming system outlined in Makarova et al. Evolution and classification of the CRISPR-Cas systems. Nature Reviews Microbiology. 2011 June; 9 (6): 467-477. Doi: 10.1038/nrmicro2577.

TABLE 1
Exemplary classification of CRISPR Cas genes by CRISPR Type

| System type or subtype | Gene Name |
|---|---|
| Type I | cas1, cas2, cas3′ |
| Type II | cas1, cas2, cas9 |
| Type III | cas1, cas2, cas10 |
| Subtype I-A | cas3″, cas4, cas5, cas6, cas7, cas8a1, |
| | cas8a2, csa5 |
| Subtype I-B | cas3″, cas4, cas5, cas6, cas7, cas8b |
| Subtype I-C | cas4, cas5, cas7, cas8c |
| Subtype I-D | cas4, cas6, cas10d, csc1, csc2 |
| Subtype I-E | cas5, cas6e, cas7, cse1, cse2 |
| Subtype I-F | cas6f, csy1, csy2, csy3 |
| Subtype II-A | csn2 |
| Subtype II-B | cas4 |
| Subtype III-A | cas6, csm2, csm3, csm4, csm5, csm6 |
| Subtype III-B | cas6, cmr1, cmr3, cmr4, cmr5, cmr6 |
| Subtype I-U | csb1, csb2, csb3, csx17, csx14, csx10 |
| Subtype III-U | csx16, csaX, csx3, csx1 |
| Unknown | csx15 |
| Type U | csf1, csf2, csf3, csf4 |

### Site-Directed Polypeptides

[0224] A site-directed polypeptide can be a polypeptide that can bind to a target nucleic acid. A site-directed polypeptide can be a nuclease.

[0225] A site-directed polypeptide can comprise a nucleic acid-binding domain. The nucleic acid-binding domain can comprise a region that contacts a nucleic acid. A nucleic acid-binding domain can comprise a nucleic acid. A nucleic acid-binding domain can comprise a proteinaceous material. A nucleic acid-binding domain can comprise nucleic acid and a proteinaceous material. A nucleic acid-binding domain can comprise RNA. There can be a single nucleic acid-binding domain. Examples of nucleic acid-binding domains can include, but are not limited to, a helix-turn-helix domain, a zinc finger domain, a leucine zipper (bZIP) domain, a winged helix domain, a winged helix turn helix domain, a helix-loop-helix domain, a HMG-box domain, a Wor3 domain, an immunoglobulin domain, a B3 domain, a TALE domain, a RNA-recognition motif domain, a double-stranded RNA-binding motif domain, a double-stranded nucleic acid binding domain, a single-stranded nucleic acid binding domains, a KH domain, a PUF domain, a RGG box domain, a DEAD/DEAH box domain, a PAZ domain, a Piwi domain, and a cold-shock domain.

[0226] A nucleic acid-binding domain can be a domain of an argonaute protein. An argonaute protein can be a eukaryotic argonaute or a prokaryotic argonaute. An argonaute protein can bind RNA, DNA, or both RNA and DNA. An argonaute protein can cleaved RNA, or DNA, or both RNA and DNA. In some instances, an argonaute protein binds a DNA and cleaves a target DNA.

[0227] In some instances, two or more nucleic acid-binding domains can be linked together. Linking a plurality of nucleic acid-binding domains together can provide increased polynucleotide targeting specificity. Two or more nucleic acid-binding domains can be linked via one or more linkers. The linker can be a flexible linker. Linkers can comprise 1, 2, 3, 4, 5, 6, 7, 8, 9, 10, 11, 12, 13, 14, 15, 16, 17, 18, 19, 20, 21, 22, 23, 24, 25, 30, 35, 40 or more amino acids in length. Linkers can comprise at least 5%, 10%, 15%, 20%, 25%, 30%, 35%, 40%, 45%, 50%, 55%, 60%, 65%, 70%, 75%, 80%, 85%, 90%, 95%, or 100% glycine content. Linkers can comprise at most 5%, 10%, 15%, 20%, 25%, 30%, 35%, 40%, 45%, 50%, 55%, 60%, 65%, 70%, 75%, 80%, 85%, 90%, 95%, or 100% glycine content. Linkers can comprise at least 5%, 10%, 15%, 20%, 25%, 30%, 35%, 40%, 45%, 50%, 55%, 60%, 65%, 70%, 75%, 80%, 85%, 90%, 95%, or 100% serine content. Linkers can comprise at most 5%, 10%, 15%, 20%, 25%, 30%, 35%, 40%, 45%, 50%, 55%, 60%, 65%, 70%, 75%, 80%, 85%, 90%, 95%, or 100% serine content.

[0228] Nucleic acid-binding domains can bind to nucleic acid sequences. Nucleic acid binding domains can bind to nucleic acids through hybridization. Nucleic acid-binding domains can be engineered (e.g. engineered to hybridize to a sequence in a genome). A nucleic acid-binding domain can be engineered by molecular cloning techniques (e.g., directed evolution, site-specific mutation, and rational mutagenesis).

[0229] A site-directed polypeptide can comprise a nucleic acid-cleaving domain. The nucleic acid-cleaving domain can be a nucleic acid-cleaving domain from any nucleic acid-cleaving protein. The nucleic acid-cleaving domain can originate from a nuclease. Suitable nucleic acid-cleaving domains include the nucleic acid-cleaving domain of endonucleases (e.g., AP endonuclease, RecBCD enonuclease, T7 endonuclease, T4 endonuclease IV, Bal 31 endonuclease, EndonucleaseI (endo I), Micrococcal nuclease, Endonuclease II (endo VI, exo III)), exonucleases, restriction nucleases, endoribonucleases, exoribonucleases, RNases (e.g., RNAse I, II, or III). In some instances, the nucleic acid-cleaving domain can originate from the FokI endonuclease. A site-directed polypeptide can comprise a plurality of nucleic acid-cleaving domains. Nucleic acid-cleaving domains can be linked together. Two or more nucleic acid-cleaving domains can be linked via a linker. In some embodiments, the linker can be a flexible linker. Linkers can comprise 1, 2, 3, 4, 5, 6, 7, 8, 9, 10, 11, 12, 13, 14, 15, 16, 17, 18, 19, 20, 21, 22, 23, 24, 25, 30, 35, 40 or more amino acids in length. In some embodiments, a site-directed polypeptide can comprise the plurality of nucleic acid-cleaving domains.

[0230] A site-directed polypeptide (e.g., Cas9, argonaute) can comprise two or more nuclease domains. Cas9 can comprise a HNH or HNH-like nuclease domain and/or a RuvC or RuvC-like nuclease domain. HNH or HNH-like domains can comprise a McrA-like fold. HNH or HNH-like domains can comprise two antiparallel B-strands and an a-helix. HNH or HNH-like domains can comprise a metal binding site (e.g., divalent cation binding site). HNH or HNH-like domains can cleave one strand of a target nucleic acid (e.g., complementary strand of the crRNA targeted strand). Proteins that comprise an HNH or HNH-like domain can include endonucleases, clicins, restriction endonucleases, transposases, and DNA packaging factors.

[0231] RuvC or RuvC-like domains can comprise an RNascH or RNaseH-like fold. RuvC/RNaseH domains can be involved in a diverse set of nucleic acid-based functions including acting on both RNA and DNA. The RNaseH domain can comprise 5 B-strands surrounded by a plurality of a-helices. RuvC/RNascH or RuvC/RNaseH-like domains can comprise a metal binding site (e.g., divalent cation binding site). RuvC/RNascH or RuvC/RNaseH-like domains can cleave one strand of a target nucleic acid (e.g., non-complementary strand of the crRNA targeted strand). Proteins that comprise a RuvC, RuvC-like, or RNaseH-like domain can include RNascH, RuvC, DNA transposases, retroviral integrases, and Argonaut proteins).

[0232] The site-directed polypeptide can be an endoribonuclease. The site-directed polypeptide can be an enzymatically inactive site-directed polypeptide. The site-directed polypeptide can be a conditionally enzymatically inactive site-directed polypeptide. Site-directed polypeptides can introduce double-stranded breaks or single-stranded breaks in nucleic acid, (e.g. genomic DNA). The double-stranded break can stimulate a cell's endogenous DNA-repair pathways (e.g. homologous recombination and non-homologous end joining (NHEJ) or alternative non-homologues end-joining (A-NHEJ)). NHEJ can repair cleaved target nucleic acid without the need for a homologous template. This can result in deletions of the target nucleic acid. Homologous recombination (HR) can occur with a homologous template. The homologous template can comprise sequences that are homologous to sequences flanking the target nucleic acid cleavage site. After a target nucleic acid is cleaved by a site-directed polypeptide the site of cleavage can be destroyed (e.g., the site may not be accessible for another round of cleavage with the original nucleic acid-targeting nucleic acid and site-directed polypeptide).

[0233] In some cases, homologous recombination can insert an exogenous polynucleotide sequence into the target nucleic acid cleavage site. An exogenous polynucleotide sequence can be called a donor polynucleotide. In some instances of the methods of the disclosure the donor polynucleotide, a portion of the donor polynucleotide, a copy of the donor polynucleotide, or a portion of a copy of the donor polynucleotide can be inserted into the target nucleic acid cleavage site. A donor polynucleotide can be an exogenous polynucleotide sequence. A donor polynucleotide can be a sequence that does not naturally occur at the target nucleic acid cleavage site. A vector can comprise a donor polynucleotide. The modifications of the target DNA due to NHEJ and/or HR can lead to, for example, mutations, deletions, alterations, integrations, gene correction, gene replacement, gene tagging, transgene insertion, nucleotide deletion, gene disruption, and/or gene mutation. The process of integrating non-native nucleic acid into genomic DNA can be referred to as genome engineering.

[0234] In some cases, the site-directed polypeptide can comprise an amino acid sequence having at most 10%, at most 15%, at most 20%, at most 30%, at most 40%, at most 50%, at most 60%, at most 70%, at most 75%, at most 80%, at most 85%, at most 90%, at most 95%, at most 99%, or 100%, amino acid sequence identity to a wild type exemplary site-directed polypeptide (e.g., Cas9 from S. pyogenes, SEQ ID NO: 8).

[0235] In some cases, the site-directed polypeptide can comprise an amino acid sequence having at least 10%, at least 15%, 20%, at least 30%, at least 40%, at least 50%, at least 60%, at least 70%, at least 75%, at least 80%, at least 85%, at least 90%, at least 95%, at least 99%, or 100%, amino acid sequence identity to a wild type exemplary site-directed polypeptide (e.g., Cas9 from S. pyogenes, SEQ ID NO: 8).

[0236] In some cases, the site-directed polypeptide can comprise an amino acid sequence having at most 10%, at most 15%, at most 20%, at most 30%, at most 40%, at most 50%, at most 60%, at most 70%, at most 75%, at most 80%, at most 85%, at most 90%, at most 95%, at most 99%, or 100%, amino acid sequence identity to the nuclease domain of a wild type exemplary site-directed polypeptide (e.g., Cas9 from S. pyogenes, SEQ ID NO: 8).

[0237] A site-directed polypeptide can comprise at least 70, 75, 80, 85, 90, 95, 97, 99, or 100% identity to wild-type site-directed polypeptide (e.g., Cas9 from S. pyogenes, SEQ ID NO: 8) over 10 contiguous amino acids. A site-directed polypeptide can comprise at most 70, 75, 80, 85, 90, 95, 97, 99, or 100% identity to wild-type site-directed polypeptide (e.g., Cas9 from S. pyogenes, SEQ ID NO: 8) over 10 contiguous amino acids. A site-directed polypeptide can comprise at least 70, 75, 80, 85, 90, 95, 97, 99, or 100% identity to a wild-type site-directed polypeptide (e.g., Cas9 from S. pyogenes, SEQ ID NO: 8) over 10 contiguous amino acids in a HNH nuclease domain of the site-directed polypeptide. A site-directed polypeptide can comprise at most 70, 75, 80, 85, 90, 95, 97, 99, or 100% identity to a wild-type site-directed polypeptide (e.g., Cas9 from S. pyogenes, SEQ ID NO: 8) over 10 contiguous amino acids in a HNH nuclease domain of the site-directed polypeptide. A site-directed polypeptide can comprise at least 70, 75, 80, 85, 90, 95, 97, 99, or 100% identity to a wild-type site-directed polypeptide (e.g., Cas9 from S. pyogenes, SEQ ID NO: 8) over 10 contiguous amino acids in a RuvC nuclease domain of the site-directed polypeptide. A site-directed polypeptide can comprise at most 70, 75, 80, 85, 90, 95, 97, 99, or 100% identity to a wild-type site-directed polypeptide (e.g., Cas9 from S. pyogenes, SEQ ID NO: 8) over 10 contiguous amino acids in a RuvC nuclease domain of the site-directed polypeptide.

[0238] In some cases, the site-directed polypeptide can comprise an amino acid sequence having at least 10%, at least 15%, at least 20%, at least 30%, at least 40%, at least 50%, at least 60%, at least 70%, at least 75%, at least 80%, at least 85%, at least 90%, at least 95%, at least 99%, or 100%, amino acid sequence identity to the nuclease domain of a wild type exemplary site-directed polypeptide (e.g., Cas9 from S. pyogenes).

[0239] The site-directed polypeptide can comprise a modified form of a wild type exemplary site-directed polypeptide. The modified form of the wild type exemplary site-directed polypeptide can comprise an amino acid change (e.g., deletion, insertion, or substitution) that reduces the nucleic acid-cleaving activity of the site-directed polypeptide. For example, the modified form of the wild type exemplary site-directed polypeptide can have less than less than 90%, less than 80%, less than 70%, less than 60%, less than 50%, less than 40%, less than 30%, less than 20%, less than 10%, less than 5%, or less than 1% of the nucleic acid-cleaving activity of the wild-type exemplary site-directed polypeptide (e.g., Cas9 from S. pyogenes). The modified form of the site-directed polypeptide can have no substantial nucleic acid-cleaving activity. When a site-directed polypeptide is a modified form that has no substantial nucleic acid-cleaving activity, it can be referred to as “enzymatically inactive.”

[0240] The modified form of the wild type exemplary site-directed polypeptide can have more than 90%, more than 80%, more than 70%, more than 60%, more than 50%, more than 40%, more than 30%, more than 20%, more than 10%, more than 5%, or more than 1% of the nucleic acid-cleaving activity of the wild-type exemplary site-directed polypeptide (e.g., Cas9 from S. pyogenes).

[0241] The modified form of the site-directed polypeptide can comprise a mutation. The modified form of the site-directed polypeptide can comprise a mutation such that it can induce a single-stranded break (SSB) on a target nucleic acid (e.g., by cutting only one of the sugar-phosphate backbones of the target nucleic acid). The mutation can result in less than 90%, less than 80%, less than 70%, less than 60%, less than 50%, less than 40%, less than 30%, less than 20%, less than 10%, less than 5%, or less than 1% of the nucleic acid-cleaving activity in one or more of the plurality of nucleic acid-cleaving domains of the wild-type site directed polypeptide (e.g., Cas9 from S. pyogenes). The mutation can result in one or more of the plurality of nucleic acid-cleaving domains retaining the ability to cleave the complementary strand of the target nucleic acid but reducing its ability to cleave the non-complementary strand of the target nucleic acid. The mutation can result in one or more of the plurality of nucleic acid-cleaving domains retaining the ability to cleave the non-complementary strand of the target nucleic acid but reducing its ability to cleave the complementary strand of the target nucleic acid. For example, residues in the wild type exemplary S. pyogenes Cas9 polypeptide such as Asp10, His840, Asn854 and Asn856 can be mutated to inactivate one or more of the plurality of nucleic acid-cleaving domains (e.g., nuclease domains). The residues to be mutated can correspond to residues Asp10, His840, Asn854 and Asn856 in the wild type exemplary S. pyogenes Cas9 polypeptide (e.g., as determined by sequence and/or structural alignment). Non-limiting examples of mutations can include D10A, H840A, N854A or N856A. One skilled in the art will recognize that mutations other than alanine substitutions are suitable.

[0242] A D10A mutation can be combined with one or more of H840A, N854A, or N856A mutations to produce a site-directed polypeptide substantially lacking DNA cleavage activity. A H840A mutation can be combined with one or more of D10A, N854A, or N856A mutations to produce a site-directed polypeptide substantially lacking DNA cleavage activity. A N854A mutation can be combined with one or more of H840A, D10A, or N856A mutations to produce a site-directed polypeptide substantially lacking DNA cleavage activity. A N856A mutation can be combined with one or more of H840A, N854A, or D10A mutations to produce a site-directed polypeptide substantially lacking DNA cleavage activity. Site-directed polypeptides that comprise one substantially inactive nuclease domain can be referred to as nickases.

[0243] Mutations of the disclosure can be produced by site-directed mutation. Mutations can include substitutions, additions, and deletions, or any combination thereof. In some instances, the mutation converts the mutated amino acid to alanine. In some instances, the mutation converts the mutated amino acid to another amino acid (e.g., glycine, serine, threonine, cysteine, valine, leucine, isoleucine, methionine, proline, phenylalanine, tyrosine, tryptophan, aspartic acid, glutamic acid, asparagines, glutamine, histidine, lysine, or arginine). The mutation can convert the mutated amino acid to a non-natural amino acid (e.g., selenomethionine). The mutation can convert the mutated amino acid to amino acid mimics (e.g., phosphomimics). The mutation can be a conservative mutation. For example, the mutation can convert the mutated amino acid to amino acids that resemble the size, shape, charge, polarity, conformation, and/or rotamers of the mutated amino acids (e.g., cysteine/serine mutation, lysine/asparagine mutation, histidine/phenylalanine mutation).

[0244] In some instances, the site-directed polypeptide (e.g., variant, mutated, enzymatically inactive and/or conditionally enzymatically inactive site-directed polypeptide) can target nucleic acid. The site-directed polypeptide (e.g., variant, mutated, enzymatically inactive and/or conditionally enzymatically inactive endoribonuclease) can target RNA. Site-directed polypeptides that can target RNA can include members of other CRISPR subfamilies such as Cas6 and Cas5.

[0245] The site-directed polypeptide can comprise one or more non-native sequences (e.g., a fusion).

[0246] A site-directed polypeptide can comprise an amino acid sequence comprising at least 15% amino acid identity to a Cas9 from a bacterium (e.g., S. pyogenes), a nucleic acid binding domain, and two nucleic acid cleaving domains (i.e., an HNH domain and a RuvC domain).

[0247] A site-directed polypeptide can comprise an amino acid sequence comprising at least 15% amino acid identity to a Cas9 from a bacterium (e.g., S. pyogenes), and two nucleic acid cleaving domains (i.e., an HNH domain and a RuvC domain).

[0248] A site-directed polypeptide can comprise an amino acid sequence comprising at least 15% amino acid identity to a Cas9 from a bacterium (e.g., S. pyogenes), and two nucleic acid cleaving domains, wherein one or both of the nucleic acid cleaving domains comprise at least 50% amino acid identity to a nuclease domain from Cas9 from a bacterium (e.g., S. pyogenes).

[0249] A site-directed polypeptide can comprise an amino acid sequence comprising at least 15% amino acid identity to a Cas9 from a bacterium (e.g., S. pyogenes), two nucleic acid cleaving domains (i.e., an HNH domain and a RuvC domain), and a linker linking the site-directed polypeptide to a non-native sequence.

[0250] A site-directed polypeptide can comprise an amino acid sequence comprising at least 15% amino acid identity to a Cas9 from a bacterium (e.g., S. pyogenes), two nucleic acid cleaving domains (i.e., an HNH domain and a RuvC domain), wherein the site-directed polypeptide comprises a mutation in one or both of the nucleic acid cleaving domains that reduces the cleaving activity of the nuclease domains by at least 50%.

[0251] A site-directed polypeptide can comprise an amino acid sequence comprising at least 15% amino acid identity to a Cas9 from a bacterium (e.g., S. pyogenes), and two nucleic acid cleaving domains (i.e., an HNH domain and a RuvC domain), wherein one of the nuclease domains comprises mutation of aspartic acid 10, and/or wherein one of the nuclease domains comprises mutation of histidine 840, and wherein the mutation reduce the cleaving activity of the nuclease domains by at least 50%.

### Endoribonucleases

[0252] In some embodiments, a site-directed polypeptide can be an endoribonuclease.

[0253] In some cases, the endoribonuclease can comprise an amino acid sequence having at most about 20%, at most about 30%, at most about 40%, at most about 50%, at most about 60%, at most about 70%, at most about 75%, at most about 80%, at most about 85%, at most about 90%, at most about 95%, at most about 99%, or 100%, amino acid sequence identity and/or homology to a wild type reference endoribonuclease. The endoribonuclease can comprise an amino acid sequence having at least about 20%, at least about 30%, at least about 40%, at least about 50%, at least about 60%, at least about 70%, at least about 75%, at least about 80%, at least about 85%, at least about 90%, at least about 95%, at least about 99%, or 100%, amino acid sequence identity and/or homology to a wild type reference endoribonuclease (e.g., Csy4 from P. aeruginosa). The reference endoribonuclease can be a Cas6 family member (e.g., Csy4, Cas6). The reference endoribonuclease can be a Cas5 family member (e.g., Cas5 from D. vulgaris). The reference endoribonuclease can be a Type I CRISPR family member (e.g., Cas3). The reference endoribonucleases can be a Type II family member. The reference endoribonuclease can be a Type III family member (e.g., Cas6). A reference endoribonuclease can be a member of the Repeat Associated Mysterious Protein (RAMP) superfamily (e.g., Cas7).

[0254] The endoribonuclease can comprise amino acid modifications (e.g., substitutions, deletions, additions etc). The endoribonuclease can comprise one or more non-native sequences (e.g., a fusion, an affinity tag). The amino acid modifications may not substantially alter the activity of the endoribonuclease. An endoribonuclease comprising amino acid modifications and/or fusions can retain at least about 75%, at least about 80%, at least about 85%, at least about 90%, at least about 95%, at least about 97% or 100% activity of the wild-type endoribonuclease.

[0255] The modification can result in alteration of the enzymatic activity of the endoribonuclease. The modification can result in less than 90%, less than 80%, less than 70%, less than 60%, less than 50%, less than 40%, less than 30%, less than 20%, less than 10%, less than 5%, or less than 1% of the endoribonuclease. In some instances, the modification occurs in the nuclease domain of an endoribonuclease. Such modifications can result in less than 90%, less than 80%, less than 70%, less than 60%, less than 50%, less than 40%, less than 30%, less than 20%, less than 10%, less than 5%, or less than 1% of the nucleic acid-cleaving ability in one or more of the plurality of nucleic acid-cleaving domains of the wild-type endoribonuclease.

### Conditionally Enzymatically Inactive Endoribonucleases

[0256] In some embodiments, an endoribonuclease can be conditionally enzymatically inactive. A conditionally enzymatically inactive endoribonuclease can bind to a polynucleotide in a sequence-specific manner. A conditionally enzymatically inactive endoribonuclease can bind a polynucleotide in a sequence-specific manner, but cannot cleave the target polyribonucleotide.

[0257] In some cases, the conditionally enzymatically inactive endoribonuclease can comprise an amino acid sequence having up to about 20%, up to about 30%, up to about 40%, up to about 50%, up to about 60%, up to about 70%, up to about 75%, up to about 80%, up to about 85%, up to about 90%, up to about 95%, up to about 99%, or 100%, amino acid sequence identity and/or homology to a reference conditionally enzymatically endoribonuclease (e.g., Csy4 from P. aeruginosa). In some cases, the conditionally enzymatically inactive endoribonuclease can comprise an amino acid sequence having at least about 20%, at least about 30%, at least about 40%, at least about 50%, at least about 60%, at least about 70%, at least about 75%, at least about 80%, at least about 85%, at least about 90%, at least about 95%, at least about 99%, or 100%, amino acid sequence identity and/or homology to a reference conditionally enzymatically endoribonuclease (e.g., Csy4 from P. aeruginosa).

[0258] The conditionally enzymatically inactive endoribonuclease can comprise a modified form of an endoribonuclease. The modified form of the endoribonuclease can comprise an amino acid change (e.g., deletion, insertion, or substitution) that reduces the nucleic acid-cleaving activity of the endoribonuclease. For example, the modified form of the conditionally enzymatically inactive endoribonuclease can have less than less than 90%, less than 80%, less than 70%, less than 60%, less than 50%, less than 40%, less than 30%, less than 20%, less than 10%, less than 5%, or less than 1% of the nucleic acid-cleaving activity of the reference (e.g., wild-type) conditionally enzymatically inactive endoribonuclease (e.g., Csy4 from P. aeruginosa). The modified form of the conditionally enzymatically inactive endoribonuclease can have no substantial nucleic acid-cleaving activity. When a conditionally enzymatically inactive endoribonuclease is a modified form that has no substantial nucleic acid-cleaving activity, it can be referred to as “enzymatically inactive.”

[0259] The modified form of the conditionally enzymatically inactive endoribonuclease can comprise a mutation that can result in reduced nucleic acid-cleaving ability (i.e., such that the conditionally enzymatically inactive endoribonuclease can be enzymatically inactive in one or more of the nucleic acid-cleaving domains). The mutation can result in less than 90%, less than 80%, less than 70%, less than 60%, less than 50%, less than 40%, less than 30%, less than 20%, less than 10%, less than 5%, or less than 1% of the nucleic acid-cleaving ability in one or more of the plurality of nucleic acid-cleaving domains of the wild-type endoribonuclease (e.g., Csy4 from P. aeruginosa). The mutation can occur in the nuclease domain of the endoribonuclease. The mutation can occur in a ferredoxin-like fold. The mutation can comprise the mutation of a conserved aromatic amino acid. The mutation can comprise the mutation of a catalytic amino acid. The mutation can comprise the mutation of a histidine. For example, the mutation can comprise a H29A mutation in Csy4 (e.g., Csy4 from P. aeruginosa), or any corresponding residue to H29A as determined by sequence and/or structural alignment. Other residues can be mutated to achieve the same effect (i.e. inactivate one or more of the plurality of nuclease domains).

[0260] Mutations of the invention can be produced by site-directed mutation. Mutations can include substitutions, additions, and deletions, or any combination thereof. In some instances, the mutation converts the mutated amino acid to alanine. In some instances, the mutation converts the mutated amino acid to another amino acid (e.g., glycine, serine, threonine, cysteine, valine, leucine, isoleucine, methionine, proline, phenylalanine, tyrosine, tryptophan, aspartic acid, glutamic acid, asparagines, glutamine, histidine, lysine, or arginine). The mutation can convert the mutated amino acid to a non-natural amino acid (e.g., selenomethionine). The mutation can convert the mutated amino acid to amino acid mimics (e.g., phosphomimics). The mutation can be a conservative mutation. For example, the mutation can convert the mutated amino acid to amino acids that resemble the size, shape, charge, polarity, conformation, and/or rotamers of the mutated amino acids (e.g., cysteine/serine mutation, lysine/asparagine mutation, histidine/phenylalanine mutation).

[0261] A conditionally enzymatically inactive endoribonuclease can be enzymatically inactive in the absence of a reactivation agent (e.g., imidazole). A reactivation agent can be an agent that mimics a histidine residue (e.g., may have an imidazole ring). A conditionally enzymatically inactive endoribonuclease can be activated by contact with a reactivation agent. The reactivation agent can comprise imidazole. For example, the conditionally enzymatically inactive endoribonuclease can be enzymatically activated by contacting the conditionally enzymatically inactive endoribonuclease with imidazole at a concentration of from about 100 mM to about 500 mM. The imidazole can be at a concentration of about 100 mM, about 150 mM, about 200 mM, about 250 mM, about 300 mM, about 350 mM, about 400 mM, about 450 mM, about 500 mM, about 550 mM, or about 600 mM. The presence of imidazole (e.g., in a concentration range of from about 100 mM to about 500 mM) can reactivate the conditionally enzymatically inactive endoribonuclease such that the conditionally enzymatically inactive endoribonuclease becomes enzymatically active, e.g., the conditionally enzymatically inactive endoribonuclease exhibits at least about 50%, at least about 60%, at least about 70%, at least about 80%, at least about 90%, at least about 95%, or more than 95%, of the nucleic acid cleaving ability of a reference conditionally enzymatically inactive endoribonuclease (e.g., Csy4 from P. aeruginosa comprising H29A mutation).

[0262] A conditionally enzymatically inactive endoribonuclease can comprise at least 20% amino acid identity to Csy4 from P. aeruginosa, a mutation of histidine 29, wherein the mutation results in at least 50% reduction of nuclease activity of the endoribonuclease, and wherein at least 50% of the lost nuclease activity can be restored by incubation of the endoribonuclease with at least 100 mM imidazole.

### Codon-Optimization

[0263] A polynucleotide encoding a site-directed polypeptide and/or an endoribonuclease can be codon-optimized. This type of optimization can entail the mutation of foreign-derived (e.g., recombinant) DNA to mimic the codon preferences of the intended host organism or cell while encoding the same protein. Thus, the codons can be changed, but the encoded protein remains unchanged. For example, if the intended target cell was a human cell, a human codon-optimized polynucleotide Cas9 could be used for producing a suitable site-directed polypeptide. As another non-limiting example, if the intended host cell were a mouse cell, then a mouse codon-optimized polynucleotide encoding Cas9 could be a suitable site-directed polypeptide. A polynucleotide encoding a site-directed polypeptide can be codon optimized for many host cells of interest. A host cell can be a cell from any organism (e.g. a bacterial cell, an archacal cell, a cell of a single-cell eukaryotic organism, a plant cell, an algal cell, e.g., Botryococcus braunii, Chlamydomonas reinhardtii, Nannochloropsis gaditana, Chlorella pyrenoidosa, Sargassum patens C. Agardh, and the like, a fungal cell (e.g., a yeast cell), an animal cell, a cell from an invertebrate animal (e.g. fruit fly, cnidarian, echinoderm, nematode, etc.), a cell from a vertebrate animal (e.g., fish, amphibian, reptile, bird, mammal), a cell from a mammal (e.g., a pig, a cow, a goat, a sheep, a rodent, a rat, a mouse, a non-human primate, a human, etc.), etc. Codon optimization may not be required. In some instances, codon optimization can be preferable.

### Nucleic Acid-Targeting Nucleic Acid

[0264] The present disclosure provides for a nucleic acid-targeting nucleic acid that can direct the activities of an associated polypeptide (e.g., a site-directed polypeptide) to a specific target sequence within a target nucleic acid. The nucleic acid-targeting nucleic acid can comprise nucleotides. The nucleic acid-targeting nucleic acid can be RNA. A nucleic acid-targeting nucleic acid can comprise a single guide nucleic acid-targeting nucleic acid. An exemplary single guide nucleic acid is depicted in FIG. 1A. The spacer extension 105 and the tracrRNA extension 135 can comprise elements that can contribute additional functionality (e.g., stability) to the nucleic acid-targeting nucleic acid. In some embodiments the spacer extension 105 and the tracrRNA extension 135 are optional. A spacer sequence 110 can comprise a sequence that can hybridize to a target nucleic acid sequence. The spacer sequence 110 can be a variable portion of the nucleic acid-targeting nucleic acid. The sequence of the spacer sequence 110 can be engineered to hybridize to the target nucleic acid sequence. The CRISPR repeat 115 (i.e. referred to in this exemplary embodiment as a minimum CRISPR repeat) can comprise nucleotides that can hybridize to a tracrRNA sequence 125 (i.e. referred to in this exemplary embodiment as a minimum tracrRNA sequence). The minimum CRISPR repeat 115 and the minimum tracrRNA sequence 125 can interact, the interacting molecules comprising a base-paired, double-stranded structure. Together, the minimum CRISPR repeat 115 and the minimum tracrRNA sequence 125 can facilitate binding to the site-directed polypeptide. The minimum CRISPR repeat 115 and the minimum tracrRNA sequence 125 can be linked together to form a hairpin structure through the single guide connector 120. The 3′ tracrRNA sequence 130 can comprise a protospacer adjacent motif recognition sequence. The 3′ tracrRNA sequence 130 can be identical or similar to part of a tracrRNA sequence. In some embodiments, the 3′ tracrRNA sequence 130 can comprise one or more hairpins.

[0265] In some embodiments, a nucleic acid-targeting nucleic acid can comprise a single guide nucleic acid-targeting nucleic acid as depicted in FIG. 1B. A nucleic acid-targeting nucleic acid can comprise a spacer sequence 140. A spacer sequence 140 can comprise a sequence that can hybridize to the target nucleic acid sequence. The spacer sequence 140 can be a variable portion of the nucleic acid-targeting nucleic acid. The spacer sequence 140 can be 5′ of a first duplex 145. The first duplex 145 comprises a region of hybridization between a minimum CRISPR repeat 146 and minimum tracrRNA sequence 147. The first duplex 145 can be interrupted by a bulge 150. The bulge 150 can comprise unpaired nucleotides. The bulge 150 can be facilitate the recruitment of a site-directed polypeptide to the nucleic acid-targeting nucleic acid. The bulge 150 can be followed by a first stem 155. The first stem 155 comprises a linker sequence linking the minimum CRISPR repeat 146 and the minimum tracrRNA sequence 147. The last paired nucleotide at the 3′ end of the first duplex 145 can be connected to a second linker sequence 160. The second linker 160 can comprise a P-domain. The second linker 160 can link the first duplex 145 to a mid-tracrRNA 165. The mid-tracrRNA 165 can, in some embodiments, comprise one or more hairpin regions. For example the mid-tracrRNA 165 can comprise a second stem 170 and a third stem 180. A third linker 175 can link the second stem 170 and the third stem 180.

[0266] In some embodiments, the nucleic acid-targeting nucleic acid can comprise a double guide nucleic acid structure. FIG. 2 depicts an exemplary double guide nucleic acid-targeting nucleic acid structure. Similar to the single guide nucleic acid structure of FIG. 1, the double guide nucleic acid structure can comprise a spacer extension 205, a spacer 210, a minimum CRISPR repeat 215, a minimum tracrRNA sequence 230, a 3′ tracrRNA sequence 235, and a tracrRNA extension 240. However, a double guide nucleic acid-targeting nucleic acid may not comprise the single guide connector 120. Instead the minimum CRISPR repeat sequence 215 can comprise a 3′ CRISPR repeat sequence 220 which can be similar or identical to part of a CRISPR repeat. Similarly, the minimum tracrRNA sequence 230 can comprise a 5′ tracrRNA sequence 225 which can be similar or identical to part of a tracrRNA. The double guide RNAs can hybridize together via the minimum CRISPR repeat 215 and the minimum tracrRNA sequence 230.

[0267] In some embodiments, the first segment (i.e., nucleic acid-targeting segment) can comprise the spacer extension (e.g., 105/205) and the spacer (e.g., 110/210). The nucleic acid-targeting nucleic acid can guide the bound polypeptide to a specific nucleotide sequence within target nucleic acid via the above mentioned nucleic acid-targeting segment.

[0268] In some embodiments, the second segment (i.e., protein binding segment) can comprise the minimum CRISPR repeat (e.g., 115/215), the minimum tracrRNA sequence (e.g., 125/230), the 3′ tracrRNA sequence (e.g., 130/235), and/or the tracrRNA extension sequence (e.g., 135/240). The protein-binding segment of a nucleic acid-targeting nucleic acid can interact with a site-directed polypeptide. The protein-binding segment of a nucleic acid-targeting nucleic acid can comprise two stretches of nucleotides that that can hybridize to one another. The nucleotides of the protein-binding segment can hybridize to form a double-stranded nucleic acid duplex. The double-stranded nucleic acid duplex can be RNA. The double-stranded nucleic acid duplex can be DNA.

[0269] In some instances, a nucleic acid-targeting nucleic acid can comprise, in the order of 5′ to 3′, a spacer extension, a spacer, a minimum CRISPR repeat, a single guide connector, a minimum tracrRNA, a 3′ tracrRNA sequence, and a tracrRNA extension. In some instances, a nucleic acid-targeting nucleic acid can comprise, a tracrRNA extension, a 3′tracrRNA sequence, a minimum tracrRNA, a single guide connector, a minimum CRISPR repeat, a spacer, and a spacer extension in any order.

[0270] A nucleic acid-targeting nucleic acid and a site-directed polypeptide can form a complex. The nucleic acid-targeting nucleic acid can provide target specificity to the complex by comprising a nucleotide sequence that can hybridize to a sequence of a target nucleic acid. In other words, the site-directed polypeptide can be guided to a nucleic acid sequence by virtue of its association with at least the protein-binding segment of the nucleic acid-targeting nucleic acid. The nucleic acid-targeting nucleic acid can direct the activity of a Cas9 protein. The nucleic acid-targeting nucleic acid can direct the activity of an enzymatically inactive Cas9 protein.

[0271] Methods of the disclosure can provide for a genetically modified cell. A genetically modified cell can comprise an exogenous nucleic acid-targeting nucleic acid and/or an exogenous nucleic acid comprising a nucleotide sequence encoding a nucleic acid-targeting nucleic acid.

### Spacer Extension Sequence

[0272] A spacer extension sequence can provide stability and/or provide a location for modifications of a nucleic acid-targeting nucleic acid. A spacer extension sequence can have a length of from about 1 nucleotide to about 400 nucleotides. A spacer extension sequence can have a length of more than 1, 5, 10, 15, 20, 25, 30, 35, 40, 45, 50, 60, 70, 80, 90, 100, 120, 140, 160, 180, 200, 220, 240, 260, 280, 300, 320, 340, 360, 380, 40,1000, 2000, 3000, 4000, 5000, 6000, or 7000 or more nucleotides. A spacer extension sequence can have a length of less than 1, 5, 10, 15, 20, 25, 30, 35, 40, 45, 50, 60, 70, 80, 90, 100, 120, 140, 160, 180, 200, 220, 240, 260, 280, 300, 320, 340, 360, 380, 400, 1000, 2000, 3000, 4000, 5000, 6000, 7000 or more nucleotides. A spacer extension sequence can be less than 10 nucleotides in length. A spacer extension sequence can be between 10 and 30 nucleotides in length. A spacer extension sequence can be between 30-70 nucleotides in length.

[0273] The spacer extension sequence can comprise a moiety (e.g., a stability control sequence, an endoribonuclease binding sequence, a ribozyme). A moiety can influence the stability of a nucleic acid targeting RNA. A moiety can be a transcriptional terminator segment (i.e., a transcription termination sequence). A moiety of a nucleic acid-targeting nucleic acid can have a total length of from about 10 nucleotides to about 100 nucleotides, from about 10 nucleotides (nt) to about 20 nt, from about 20 nt to about 30 nt, from about 30 nt to about 40 nt, from about 40 nt to about 50 nt, from about 50 nt to about 60 nt, from about 60 nt to about 70 nt, from about 70 nt to about 80 nt, from about 80 nt to about 90 nt, or from about 90 nt to about 100 nt, from about 15 nucleotides (nt) to about 80 nt, from about 15 nt to about 50 nt, from about 15 nt to about 40 nt, from about 15 nt to about 30 nt or from about 15 nt to about 25 nt. The moiety can be one that can function in a eukaryotic cell. In some cases, the moiety can be one that can function in a prokaryotic cell. The moiety can be one that can function in both a eukaryotic cell and a prokaryotic cell.

[0274] Non-limiting examples of suitable moieties can include: 5′ cap (e.g., a 7-methylguanylate cap (m7G)), a riboswitch sequence (e.g., to allow for regulated stability and/or regulated accessibility by proteins and protein complexes), a sequence that forms a dsRNA duplex (i.e., a hairpin), a sequence that targets the RNA to a subcellular location (e.g., nucleus, mitochondria, chloroplasts, and the like), a modification or sequence that provides for tracking (e.g., direct conjugation to a fluorescent molecule, conjugation to a moiety that facilitates fluorescent detection, a sequence that allows for fluorescent detection, etc.), a modification or sequence that provides a binding site for proteins (e.g., proteins that act on DNA, including transcriptional activators, transcriptional repressors, DNA methyltransferases, DNA demethylases, histone acetyltransferases, histone deacetylases, and the like) a modification or sequence that provides for increased, decreased, and/or controllable stability, or any combination thereof. A spacer extension sequence can comprise a primer binding site, a molecular index (e.g., barcode sequence). The spacer extension sequence can comprise a nucleic acid affinity tag.

### Spacer

[0275] The nucleic acid-targeting segment of a nucleic acid-targeting nucleic acid can comprise a nucleotide sequence (e.g., a spacer) that can hybridize to a sequence in a target nucleic acid. The spacer of a nucleic acid-targeting nucleic acid can interact with a target nucleic acid in a sequence-specific manner via hybridization (i.e., base pairing). As such, the nucleotide sequence of the spacer may vary and can determine the location within the target nucleic acid that the nucleic acid-targeting nucleic acid and the target nucleic acid can interact.

[0276] The spacer sequence can hybridize to a target nucleic acid that is located 5′ of spacer adjacent motif (PAM). Different organisms may comprise different PAM sequences. For example, in S. pyogenes, the PAM can be a sequence in the target nucleic acid that comprises the sequence 5′-XRR-3′, where R can be either A or G, where X is any nucleotide and X is immediately 3′ of the target nucleic acid sequence targeted by the spacer sequence.

[0277] The target nucleic acid sequence can be 20 nucleotides. The target nucleic acid can be less than 20 nucleotides. The target nucleic acid can be at least 5, 10, 15, 16, 17, 18, 19, 20, 21, 22, 23, 24, 25, 30 or more nucleotides. The target nucleic acid can be at most 5, 10, 15, 16, 17, 18, 19, 20, 21, 22, 23, 24, 25, 30 or more nucleotides. The target nucleic acid sequence can be 20 bases immediately 5′ of the first nucleotide of the PAM. For example, in a sequence comprising 5′-NNNNNNNNNNNNNNNNNNNNXRR-3′ (SEQ ID NO: 1611) (X is any nucleotide (N) and X is immediately 3′ of the target nucleic acid sequence targeted by the spacer sequence), the target nucleic acid can be the sequence that corresponds to the N's, wherein N is any nucleotide.

[0278] The nucleic acid-targeting sequence of the spacer that can hybridize to the target nucleic acid can have a length at least about 6 nt. For example, the spacer sequence that can hybridize the target nucleic acid can have a length at least about 6 nt, at least about 10 nt, at least about 15 nt, at least about 18 nt, at least about 19 nt, at least about 20 nt, at least about 25 nt, at least about 30 nt, at least about 35 nt or at least about 40 nt, from about 6 nt to about 80 nt, from about 6 nt to about 50nt, from about 6 nt to about 45 nt, from about 6 nt to about 40 nt, from about 6 nt to about 35 nt, from about 6 nt to about 30 nt, from about 6 nt to about 25 nt, from about 6 nt to about 20 nt, from about 6 nt to about 19 nt, from about 10 nt to about 50nt, from about 10 nt to about 45 nt, from about 10 nt to about 40 nt, from about 10 nt to about 35 nt, from about 10 nt to about 30 nt, from about 10 nt to about 25 nt, from about 10 nt to about 20 nt, from about 10 nt to about 19 nt, from about 19 nt to about 25 nt, from about 19 nt to about 30 nt, from about 19 nt to about 35 nt, from about 19 nt to about 40 nt, from about 19 nt to about 45 nt, from about 19 nt to about 50 nt, from about 19 nt to about 60 nt, from about 20 nt to about 25 nt, from about 20 nt to about 30 nt, from about 20 nt to about 35 nt, from about 20 nt to about 40 nt, from about 20 nt to about 45 nt, from about 20 nt to about 50 nt, or from about 20 nt to about 60 nt. In some cases, the spacer sequence that can hybridize the target nucleic acid can be 20 nucleotides in length. The spacer that can hybridize the target nucleic acid can be 19 nucleotides in length.

[0279] The percent complementarity between the spacer sequence the target nucleic acid can be at least about 30%, at least about 40%, at least about 50%, at least about 60%, at least about 65%, at least about 70%, at least about 75%, at least about 80%, at least about 85%, at least about 90%, at least about 95%, at least about 97%, at least about 98%, at least about 99%, or 100%. The percent complementarity between the spacer sequence the target nucleic acid can be at most about 30%, at most about 40%, at most about 50%, at most about 60%, at most about 65%, at most about 70%, at most about 75%, at most about 80%, at most about 85%, at most about 90%, at most about 95%, at most about 97%, at most about 98%, at most about 99%, or 100%. In some cases, the percent complementarity between the spacer sequence and the target nucleic acid can be 100% over the six contiguous 5′-most nucleotides of the target sequence of the complementary strand of the target nucleic acid. In some cases, the percent complementarity between the spacer sequence and the target nucleic acid can be at least 60% over about 20 contiguous nucleotides. In some cases, the percent complementarity between the spacer sequence and the target nucleic acid can be 100% over the fourteen contiguous 5′-most nucleotides of the target sequence of the complementary strand of the target nucleic acid and as low as 0% over the remainder. In such a case, the spacer sequence can be considered to be 14 nucleotides in length. In some cases, the percent complementarity between the spacer sequence and the target nucleic acid can be 100% over the six contiguous 5′-most nucleotides of the target sequence of the complementary strand of the target nucleic acid and as low as 0% over the remainder. In such a case, the spacer sequence can be considered to be 6 nucleotides in length. The target nucleic acid can be more than about 50%, 60%, 70%, 80%, 90%, or 100% complementary to the seed region of the crRNA. The target nucleic acid can be less than about 50%, 60%, 70%, 80%, 90%, or 100% complementary to the seed region of the crRNA.

[0280] The spacer segment of a nucleic acid-targeting nucleic acid can be modified (e.g., by genetic engineering) to hybridize to any desired sequence within a target nucleic acid. For example, a spacer can be engineered (e.g., designed, programmed) to hybridize to a sequence in target nucleic acid that is involved in cancer, cell growth, DNA replication, DNA repair, HLA genes, cell surface proteins, T-cell receptors, immunoglobulin superfamily genes, tumor suppressor genes, microRNA genes, long non-coding RNA genes, transcription factors, globins, viral proteins, mitochondrial genes, and the like.

[0281] A spacer sequence can be identified using a computer program (e.g., machine readable code). The computer program can use variables such as predicted melting temperature, secondary structure formation, and predicted annealing temperature, sequence identity, genomic context, chromatin accessibility, % GC, frequency of genomic occurrence, methylation status, presence of SNPs, and the like.

### Minimum CRISPR Repeat Sequence

[0282] A minimum CRISPR repeat sequence can be a sequence at least about 30%, 40%, 50%, 60%, 65%, 70%, 75%, 80%, 85%, 90%, 95%, or 100% sequence identity and/or sequence homology with a reference CRISPR repeat sequence (e.g., crRNA from S. pyogenes). A minimum CRISPR repeat sequence can be a sequence with at most about 30%, 40%, 50%, 60%, 65%, 70%, 75%, 80%, 85%, 90%, 95%, or 100% sequence identity and/or sequence homology with a reference CRISPR repeat sequence (e.g., crRNA from S. pyogenes). A minimum CRISPR repeat can comprise nucleotides that can hybridize to a minimum tracrRNA sequence. A minimum CRISPR repeat and a minimum tracrRNA sequence can form a base-paired, double-stranded structure. Together, the minimum CRISPR repeat and the minimum tracrRNA sequence can facilitate binding to the site-directed polypeptide. A part of the minimum CRISPR repeat sequence can hybridize to the minimum tracrRNA sequence. A part of the minimum CRISPR repeat sequence can be at least about 30%, 40%, 50%, 60%, 65%, 70%, 75%, 80%, 85%, 90%, 95%, or 100% complementary to the minimum tracrRNA sequence. A part of the minimum CRISPR repeat sequence can be at most about 30%, 40%, 50%, 60%, 65%, 70%, 75%, 80%, 85%, 90%, 95%, or 100% complementary to the minimum tracrRNA sequence.

[0283] The minimum CRISPR repeat sequence can have a length of from about 6 nucleotides to about 100 nucleotides. For example, the minimum CRISPR repeat sequence can have a length of from about 6 nucleotides (nt) to about 50 nt, from about 6 nt to about 40 nt, from about 6 nt to about 30nt, from about 6 nt to about 25 nt, from about 6 nt to about 20 nt, from about 6 nt to about 15 nt, from about 8 nt to about 40 nt, from about 8 nt to about 30nt, from about 8 nt to about 25 nt, from about 8 nt to about 20 nt or from about 8 nt to about 15 nt, from about 15 nt to about 100 nt, from about 15 nt to about 80 nt, from about 15 nt to about 50 nt, from about 15 nt to about 40 nt, from about 15 nt to about 30 nt or from about 15 nt to about 25 nt. In some embodiments, the minimum CRISPR repeat sequence has a length of approximately 12 nucleotides.

[0284] The minimum CRISPR repeat sequence can be at least about 60% identical to a reference minimum CRISPR repeat sequence (e.g., wild type crRNA from S. pyogenes) over a stretch of at least 6, 7, or 8 contiguous nucleotides. The minimum CRISPR repeat sequence can be at least about 60% identical to a reference minimum CRISPR repeat sequence (e.g., wild type crRNA from S. pyogenes) over a stretch of at least 6, 7, or 8 contiguous nucleotides. For example, the minimum CRISPR repeat sequence can be at least about 65% identical, at least about 70% identical, at least about 75% identical, at least about 80% identical, at least about 85% identical, at least about 90% identical, at least about 95% identical, at least about 98% identical, at least about 99% identical or 100% identical to a reference minimum CRISPR repeat sequence over a stretch of at least 6, 7, or 8 contiguous nucleotides.

Minimum tracrRNA Sequence

[0285] A minimum tracrRNA sequence can be a sequence with at least about 30%, 40%, 50%, 60%, 65%, 70%, 75%, 80%, 85%, 90%, 95%, or 100% sequence identity and/or sequence homology to a reference tracrRNA sequence (e.g., wild type tracrRNA from S. pyogenes). A minimum tracrRNA sequence can be a sequence with at most about 30%, 40%, 50%, 60%, 65%, 70%, 75%, 80%, 85%, 90%, 95%, or 100% sequence identity and/or sequence homology to a reference tracrRNA sequence (e.g., wild type tracrRNA from S. pyogenes). A minimum tracrRNA sequence can comprise nucleotides that can hybridize to a minimum CRISPR repeat sequence. A minimum tracrRNA sequence and a minimum CRISPR repeat sequence can form a base-paired, double-stranded structure. Together, the minimum tracrRNA sequence and the minimum CRISPR repeat can facilitate binding to the site-directed polypeptide. A part of the minimum tracrRNA sequence can hybridize to the minimum CRISPR repeat sequence. A part of the minimum tracrRNA sequence can be 30%, 40%, 50%, 60%, 65%, 70%, 75%, 80%, 85%, 90%, 95%, or 100% complementary to the minimum CRISPR repeat sequence.

[0286] The minimum tracrRNA sequence can have a length of from about 6 nucleotides to about 100 nucleotides. For example, the minimum tracrRNA sequence can have a length of from about 6 nucleotides (nt) to about 50 nt, from about 6 nt to about 40 nt, from about 6 nt to about 30nt, from about 6 nt to about 25 nt, from about 6 nt to about 20 nt, from about 6 nt to about 15 nt, from about 8 nt to about 40 nt, from about 8 nt to about 30nt, from about 8 nt to about 25 nt, from about 8 nt to about 20 nt or from about 8 nt to about 15 nt, from about 15 nt to about 100 nt, from about 15 nt to about 80 nt, from about 15 nt to about 50 nt, from about 15 nt to about 40 nt, from about 15 nt to about 30 nt or from about 15 nt to about 25 nt. In some embodiments, the minimum tracrRNA sequence has a length of approximately 14 nucleotides.

[0287] The minimum tracrRNA sequence can be at least about 60% identical to a reference minimum tracrRNA (e.g., wild type, tracrRNA from S. pyogenes) sequence over a stretch of at least 6, 7, or 8 contiguous nucleotides. The minimum tracrRNA sequence can be at least about 60% identical to a reference minimum tracrRNA (e.g., wild type, tracrRNA from S. pyogenes) sequence over a stretch of at least 6, 7, or 8 contiguous nucleotides. For example, the minimum tracrRNA sequence can be at least about 65% identical, at least about 70% identical, at least about 75% identical, at least about 80% identical, at least about 85% identical, at least about 90% identical, at least about 95% identical, at least about 98% identical, at least about 99% identical or 100% identical to a reference minimum tracrRNA sequence over a stretch of at least 6, 7, or 8 contiguous nucleotides.

[0288] The duplex (i.e., first duplex in FIG. 1B) between the minimum CRISPR RNA and the minimum tracrRNA can comprise a double helix. The first base of the first strand of the duplex (e.g., the minimum CRISPR repeat in FIG. 1B) can be a guanine. The first base of the first strand of the duplex (e.g., the minimum CRISPR repeat in FIG. 1B) can be an adenine. The duplex (i.e., first duplex in FIG. 1B) between the minimum CRISPR RNA and the minimum tracrRNA can comprise at least about 1, 2, 3, 4, 5, 6, 7, 8, 9, or 10 or more nucleotides. The duplex (i.e., first duplex in FIG. 1B) between the minimum CRISPR RNA and the minimum tracrRNA can comprise at most about 1, 2, 3, 4, 5, 6, 7, 8, 9, or 10 or more nucleotides.

[0289] The duplex can comprise a mismatch. The duplex can comprise at least about 1, 2, 3, 4, or 5 mismatches. The duplex can comprise at most about 1, 2, 3, 4, or 5 mismatches. In some instances, the duplex comprises no more than 2 mismatches.

### Bulge

[0290] A bulge can refer to an unpaired region of nucleotides within the duplex made up of the minimum CRISPR repeat and the minimum tracrRNA sequence. The bulge can be important in the binding to the site-directed polypeptide. A bulge can comprise, on one side of the duplex, an unpaired 5′-XXXY-3′ where X is any purine and Y can be a nucleotide that can form a wobble pair with a nucleotide on the opposite strand, and an unpaired nucleotide region on the other side of the duplex.

[0291] For example, the bulge can comprise an unpaired purine (e.g., adenine) on the minimum CRISPR repeat strand of the bulge. In some embodiments, a bulge can comprise an unpaired 5′-AAGY-3′ of the minimum tracrRNA sequence strand of the bulge, where Y can be a nucleotide that can form a wobble pairing with a nucleotide on the minimum CRISPR repeat strand.

[0292] A bulge on a first side of the duplex (e.g., the minimum CRISPR repeat side) can comprise at least 1, 2, 3, 4, or 5 or more unpaired nucleotides. A bulge on a first side of the duplex (e.g., the minimum CRISPR repeat side) can comprise at most 1, 2, 3, 4, or 5 or more unpaired nucleotides. A bulge on the first side of the duplex (e.g., the minimum CRISPR repeat side) can comprise 1 unpaired nucleotide.

[0293] A bulge on a second side of the duplex (e.g., the minimum tracrRNA sequence side of the duplex) can comprise at least 1, 2, 3, 4, 5, 6, 7, 8, 9, or 10 or more unpaired nucleotides. A bulge on a second side of the duplex (e.g., the minimum tracrRNA sequence side of the duplex) can comprise at most 1, 2, 3, 4, 5, 6, 7, 8, 9, or 10 or more unpaired nucleotides. A bulge on a second side of the duplex (e.g., the minimum tracrRNA sequence side of the duplex) can comprise 4 unpaired nucleotides.

[0294] Regions of different numbers of unpaired nucleotides on each strand of the duplex can be paired together. For example, a bulge can comprise 5 unpaired nucleotides from a first strand and I unpaired nucleotide from a second strand. A bulge can comprise 4 unpaired nucleotides from a first strand and I unpaired nucleotide from a second strand. A bulge can comprise 3 unpaired nucleotides from a first strand and I unpaired nucleotide from a second strand. A bulge can comprise 2 unpaired nucleotides from a first strand and I unpaired nucleotide from a second strand. A bulge can comprise 1 unpaired nucleotide from a first strand and 1 unpaired nucleotide from a second strand. A bulge can comprise 1 unpaired nucleotide from a first strand and 2 unpaired nucleotides from a second strand. A bulge can comprise 1 unpaired nucleotide from a first strand and 3 unpaired nucleotides from a second strand. A bulge can comprise 1 unpaired nucleotide from a first strand and 4 unpaired nucleotides from a second strand. A bulge can comprise 1 unpaired nucleotide from a first strand and 5 unpaired nucleotides from a second strand.

[0295] In some instances a bulge can comprise at least one wobble pairing. In some instances, a bulge can comprise at most one wobble pairing. A bulge sequence can comprise at least one purine nucleotide. A bulge sequence can comprise at least 3 purine nucleotides. A bulge sequence can comprise at least 5 purine nucleotides. A bulge sequence can comprise at least one guanine nucleotide. A bulge sequence can comprise at least one adenine nucleotide.

### P-Domain (P-DOMAIN)

[0296] A P-domain can refer to a region of a nucleic acid-targeting nucleic acid that can recognize a protospacer adjacent motif (PAM) in a target nucleic acid. A P-domain can hybridize to a PAM in a target nucleic acid. As such, a P-domain can comprise a sequence that is complementary to a PAM. A P-domain can be located 3′ to the minimum tracrRNA sequence. A P-domain can be located within a 3′ tracrRNA sequence (i.e., a mid-tracrRNA sequence).

[0297] A P-domain starts at least about 1, 2, 3, 4, 5, 6, 7, 8, 9, 10, 15, or 20 or more nucleotides 3′ of the last paired nucleotide in the minimum CRISPR repeat and minimum tracrRNA sequence duplex. A P-domain can start at most about 1, 2, 3, 4, 5, 6, 7, 8, 9 or 10 or more nucleotides 3′ of the last paired nucleotide in the minimum CRISPR repeat and minimum tracrRNA sequence duplex.

[0298] A P-domain can comprise at least about 1, 2, 3, 4, 5, 6, 7, 8, 9, 10, 15, or 20 or more consecutive nucleotides. A P-domain can comprise at most about 1, 2, 3, 4, 5, 6, 7, 8, 9, 10, 15, or 20 or more consecutive nucleotides.

[0299] In some instances, a P-domain can comprise a CC dinucleotide (i.e., two consecutive cytosine nucleotides). The CC dinucleotide can interact with the GG dinucleotide of a PAM, wherein the PAM comprises a 5′-XGG-3′ sequence.

[0300] A P-domain can be a nucleotide sequence located in the 3′ tracrRNA sequence (i.e., mid-tracrRNA sequence). A P-domain can comprise duplexed nucleotides (e.g., nucleotides in a hairpin, hybridized together. For example, a P-domain can comprise a CC dinucleotide that is hybridized to a GG dinucleotide in a hairpin duplex of the 3′ tracrRNA sequence (i.e., mid-tracrRNA sequence). The activity of the P-domain (e.g., the nucleic acid-targeting nucleic acid's ability to target a target nucleic acid) may be regulated by the hybridization state of the P-DOMAIN. For example, if the P-domains hybridized, the nucleic acid-targeting nucleic acid may not recognize its target. If the P-domainis unhybridized the nucleic acid-targeting nucleic acid may recognize its target.

[0301] The P-domain can interact with P-domain interacting regions within the site-directed polypeptide. The P-domain can interact with an arginine-rich basic patch in the site-directed polypeptide. The P-domain interacting regions can interact with a PAM sequence. The P-domain can comprise a stem loop. The P-domain can comprise a bulge.

3 ′tracrRNA sequence

[0302] A 3′tracr RNA sequence can be a sequence with at least about 30%, 40%, 50%, 60%, 65%, 70%, 75%, 80%, 85%, 90%, 95%, or 100% sequence identity and/or sequence homology with a reference tracrRNA sequence (e.g., a tracrRNA from S. pyogenes). A 3′tracr RNA sequence can be a sequence with at most about 30%, 40%, 50%, 60%, 65%, 70%, 75%, 80%, 85%, 90%, 95%, or 100% sequence identity and/or sequence homology with a reference tracrRNA sequence (e.g., tracrRNA from S. pyogenes).

[0303] The 3′ tracrRNA sequence can have a length of from about 6 nucleotides to about 100 nucleotides. For example, the 3′ tracrRNA sequence can have a length of from about 6 nucleotides (nt) to about 50 nt, from about 6 nt to about 40 nt, from about 6 nt to about 30nt, from about 6 nt to about 25 nt, from about 6 nt to about 20 nt, from about 6 nt to about 15 nt, from about 8 nt to about 40 nt, from about 8 nt to about 30nt, from about 8 nt to about 25 nt, from about 8 nt to about 20 nt or from about 8 nt to about 15 nt, from about 15 nt to about 100 nt, from about 15 nt to about 80 nt, from about 15 nt to about 50 nt, from about 15 nt to about 40 nt, from about 15 nt to about 30 nt or from about 15 nt to about 25 nt. In some embodiments, the 3′ tracrRNA sequence has a length of approximately 14 nucleotides.

[0304] The 3′ tracrRNA sequence can be at least about 60% identical to a reference 3′ tracrRNA sequence (e.g., wild type 3′ tracrRNA sequence from S. pyogenes) over a stretch of at least 6, 7, or 8 contiguous nucleotides. For example, the 3′ tracrRNA sequence can be at least about 60% identical, at least about 65% identical, at least about 70% identical, at least about 75% identical, at least about 80% identical, at least about 85% identical, at least about 90% identical, at least about 95% identical, at least about 98% identical, at least about 99% identical, or 100% identical, to a reference 3′ tracrRNA sequence (e.g., wild type 3′ tracrRNA sequence from S. pyogenes) over a stretch of at least 6, 7, or 8 contiguous nucleotides.

[0305] A 3′ tracrRNA sequence can comprise more than one duplexed region (e.g., hairpin, hybridized region). A 3′ tracrRNA sequence can comprise two duplexed regions.

[0306] The 3′ tracrRNA sequence can also be referred to as the mid-tracrRNA (See FIG. 1B). The mid-tracrRNA sequence can comprise a stem loop structure. In other words, the mid-tracrRNA sequence can comprise a hairpin that is different than a second or third stems, as depicted in FIG. 1B. A stem loop structure in the mid-tracrRNA (i.e., 3′ tracrRNA) can comprise at least 1, 2, 3, 4, 5, 6, 7, 8, 9, 10, 15 or 20 or more nucleotides. A stem loop structure in the mid-tracrRNA (i.e., 3′ tracrRNA) can comprise at most 1, 2, 3, 4, 5, 6, 7, 8, 9 or 10 or more nucleotides. The stem loop structure can comprise a functional moiety. For example, the stem loop structure can comprise an aptamer, a ribozyme, a protein-interacting hairpin, a CRISPR array, an intron, and an exon. The stem loop structure can comprise at least about 1, 2, 3, 4, or 5 or more functional moieties. The stem loop structure can comprise at most about 1, 2, 3, 4, or 5 or more functional moieties.

[0307] The hairpin in the mid-tracrRNA sequence can comprise a P-domain. The P-domain can comprise a double-stranded region in the hairpin.

tracrRNA Extension Sequence

[0308] A tracrRNA extension sequence can provide stability and/or provide a location for modifications of a nucleic acid-targeting nucleic acid. A tracrRNA extension sequence can have a length of from about 1 nucleotide to about 400 nucleotides. A tracrRNA extension sequence can have a length of more than 1, 5, 10, 15, 20, 25, 30, 35, 40, 45, 50, 60, 70, 80, 90, 100, 120, 140, 160, 180, 200, 220, 240, 260, 280, 300, 320, 340, 360, 380, 400 or more nucleotides. A tracrRNA extension sequence can have a length from about 20 to about 5000 or more nucleotides. A tracrRNA extension sequence can have a length of more than 1000 nucleotides. A tracrRNA extension sequence can have a length of less than 1, 5, 10, 15, 20, 25, 30, 35, 40, 45, 50, 60, 70, 80, 90, 100, 120, 140, 160, 180, 200, 220, 240, 260, 280, 300, 320, 340, 360, 380, 400 nucleotides. A tracrRNA extension sequence can have a length of less than 1000 nucleotides. A tracrRNA extension sequence can be less than 10 nucleotides in length. A tracrRNA extension sequence can be between 10 and 30 nucleotides in length. A tracrRNA extension sequence can be between 30-70 nucleotides in length.

[0309] The tracrRNA extension sequence can comprise a moiety (e.g., stability control sequence, ribozyme, endoribonuclease binding sequence). A moiety can influence the stability of a nucleic acid targeting RNA. A moiety can be a transcriptional terminator segment (i.e., a transcription termination sequence). A moiety of a nucleic acid-targeting nucleic acid can have a total length of from about 10 nucleotides to about 100 nucleotides, from about 10 nucleotides (nt) to about 20 nt, from about 20 nt to about 30 nt, from about 30 nt to about 40 nt, from about 40 nt to about 50 nt, from about 50 nt to about 60 nt, from about 60 nt to about 70 nt, from about 70 nt to about 80 nt, from about 80 nt to about 90 nt, or from about 90 nt to about 100 nt, from about 15 nucleotides (nt) to about 80 nt, from about 15 nt to about 50 nt, from about 15 nt to about 40 nt, from about 15 nt to about 30 nt or from about 15 nt to about 25 nt. The moiety can be one that can function in a eukaryotic cell. In some cases, the moiety can be one that can function in a prokaryotic cell. The moiety can be one that can function in both a eukaryotic cell and a prokaryotic cell.

[0310] Non-limiting examples of suitable tracrRNA extension moieties include: a 3′ poly-adenylated tail, a riboswitch sequence (e.g., to allow for regulated stability and/or regulated accessibility by proteins and protein complexes), a sequence that forms a dsRNA duplex (i.e., a hairpin), a sequence that targets the RNA to a subcellular location (e.g., nucleus, mitochondria, chloroplasts, and the like), a modification or sequence that provides for tracking (e.g., direct conjugation to a fluorescent molecule, conjugation to a moiety that facilitates fluorescent detection, a sequence that allows for fluorescent detection, etc.), a modification or sequence that provides a binding site for proteins (e.g., proteins that act on DNA, including transcriptional activators, transcriptional repressors, DNA methyltransferases, DNA demethylases, histone acetyltransferases, histone deacetylases, and the like) a modification or sequence that provides for increased, decreased, and/or controllable stability, or any combination thereof. A tracrRNA extension sequence can comprise a primer binding site, a molecular index (e.g., barcode sequence). In some embodiments of the disclosure, the tracrRNA extension sequence can comprise one or more affinity tags.

### Single Guide Nucleic Acid

[0311] The nucleic acid-targeting nucleic acid can be a single guide nucleic acid. The single guide nucleic acid can be RNA. A single guide nucleic acid can comprise a linker (i.e. item 120 from FIG. 1A) between the minimum CRISPR repeat sequence and the minimum tracrRNA sequence that can be called a single guide connector sequence.

[0312] The single guide connector of a single guide nucleic acid can have a length of from about 3 nucleotides to about 100 nucleotides. For example, the linker can have a length of from about 3 nucleotides (nt) to about 90 nt, from about 3 nt to about 80 nt, from about 3 nt to about 70 nt, from about 3 nt to about 60 nt, from about 3 nt to about 50 nt, from about 3 nt to about 40 nt, from about 3 nt to about 30 nt, from about 3 nt to about 20 nt or from about 3 nt to about 10 nt. For example, the linker can have a length of from about 3 nt to about 5 nt, from about 5 nt to about 10 nt, from about 10 nt to about 15 nt, from about 15 nt to about 20 nt, from about 20 nt to about 25 nt, from about 25 nt to about 30 nt, from about 30 nt to about 35 nt, from about 35 nt to about 40 nt, from about 40 nt to about 50 nt, from about 50 nt to about 60 nt, from about 60 nt to about 70 nt, from about 70 nt to about 80 nt, from about 80 nt to about 90 nt, or from about 90 nt to about 100 nt. In some embodiments, the linker of a single guide nucleic acid is between 4 and 40 nucleotides. A linker can have a length at least about 100, 500, 1000, 1500, 2000, 2500, 3000, 3500, 4000, 4500, 5000, 5500, 6000, 6500, or 7000 or more nucleotides. A linker can have a length at most about 100, 500, 1000, 1500, 2000, 2500, 3000, 3500, 4000, 4500, 5000, 5500, 6000, 6500, or 7000 or more nucleotides.

[0313] The linker sequence can comprise a functional moiety. For example, the linker sequence can comprise an aptamer, a ribozyme, a protein-interacting hairpin, a CRISPR array, an intron, and an exon. The linker sequence can comprise at least about 1, 2, 3, 4, or 5 or more functional moieties. The linker sequence can comprise at most about 1, 2, 3, 4, or 5 or more functional moieties.

[0314] In some embodiments, the single guide connector can connect the 3′ end of the minimum CRISPR repeat to the 5′ end of the minimum tracrRNA sequence. Alternatively, the single guide connector can connect the 3′ end of the tracrRNA sequence to the 5′end of the minimum CRISPR repeat. That is to say, a single guide nucleic acid can comprise a 5′ DNA-binding segment linked to a 3′ protein-binding segment. A single guide nucleic acid can comprise a 5′ protein-binding segment linked to a 3′ DNA-binding segment.

[0315] A nucleic acid-targeting nucleic acid can comprise a spacer extension sequence from 10-5000 nucleotides in length; a spacer sequence of 12-30 nucleotides in length, wherein the spacer is at least 50% complementary to a target nucleic acid; a minimum CRISPR repeat comprising at least 60% identity to a crRNA from a prokaryote (e.g., S. pyogenes) or phage over 6, 7, or 8 contiguous nucleotides and wherein the minimum CRISPR repeat has a length from 5-30 nucleotides; a minimum tracrRNA sequence comprising at least 60% identity to a tracrRNA from a bacterium (e.g., S. pyogenes) over 6, 7, or 8 contiguous nucleotides and wherein the minimum tracrRNA sequence has a length from 5-30 nucleotides; a linker sequence that links the minimum CRISPR repeat and the minimum tracrRNA and comprises a length from 3-5000 nucleotides; a 3′ tracrRNA that comprises at least 60% identity to a tracrRNA from a prokaryote (e.g., S. pyogenes) or phage over 6, 7, or 8 contiguous nucleotides and wherein the 3′ tracrRNA comprises a length from 10-20 nucleotides, and comprises a duplexed region; and/or a tracrRNA extension comprising 10-5000 nucleotides in length, or any combination thereof. This nucleic acid-targeting nucleic acid can be referred to as a single guide nucleic acid-targeting nucleic acid.

[0316] A nucleic acid-targeting nucleic acid can comprise a spacer extension sequence from 10-5000 nucleotides in length; a spacer sequence of 12-30 nucleotides in length, wherein the spacer is at least 50% complementary to a target nucleic acid; a duplex comprising 1) a minimum CRISPR repeat comprising at least 60% identity to a crRNA from a prokaryote (e.g., S. pyogenes) or phage over 6 contiguous nucleotides and wherein the minimum CRISPR repeat has a length from 5-30 nucleotides, 2) a minimum tracrRNA sequence comprising at least 60% identity to a tracrRNA from a bacterium (e.g., S. pyogenes) over 6 contiguous nucleotides and wherein the minimum tracrRNA sequence has a length from 5-30 nucleotides, and 3) a bulge wherein the bulge comprises at least 3 unpaired nucleotides on the minimum CRISPR repeat strand of the duplex and at least 1 unpaired nucleotide on the minimum tracrRNA sequence strand of the duplex; a linker sequence that links the minimum CRISPR repeat and the minimum tracrRNA and comprises a length from 3-5000 nucleotides; a 3′ tracrRNA that comprises at least 60% identity to a tracrRNA from a prokaryote (e.g., S. pyogenes) or phage over 6 contiguous nucleotides, wherein the 3′ tracrRNA comprises a length from 10-20 nucleotides and comprises a duplexed region; a P-domain that starts from 1-5 nucleotides downstream of the duplex comprising the minimum CRISPR repeat and the minimum tracrRNA, comprises 1-10 nucleotides, comprises a sequence that can hybridize to a protospacer adjacent motif in a target nucleic acid, can form a hairpin, and is located in the 3′ tracrRNA region; and/or a tracrRNA extension comprising 10-5000 nucleotides in length, or any combination thereof.

### Double Guide Nucleic Acid

[0317] A nucleic acid-targeting nucleic acid can be a double guide nucleic acid. The double guide nucleic acid can be RNA. The double guide nucleic acid can comprise two separate nucleic acid molecules (i.e. polynucleotides). Each of the two nucleic acid molecules of a double guide nucleic acid-targeting nucleic acid can comprise a stretch of nucleotides that can hybridize to one another such that the complementary nucleotides of the two nucleic acid molecules hybridize to form the double-stranded duplex of the protein-binding segment. If not otherwise specified, the term “nucleic acid-targeting nucleic acid” can be inclusive, referring to both single-molecule nucleic acid-targeting nucleic acids and double-molecule nucleic acid-targeting nucleic acids.

[0318] A double-guide nucleic acid-targeting nucleic acid can comprise 1) a first nucleic acid molecule comprising a spacer extension sequence from 10-5000 nucleotides in length; a spacer sequence of 12-30 nucleotides in length, wherein the spacer is at least 50% complementary to a target nucleic acid; and a minimum CRISPR repeat comprising at least 60% identity to a crRNA from a prokaryote (e.g., S. pyogenes) or phage over 6 contiguous nucleotides and wherein the minimum CRISPR repeat has a length from 5-30 nucleotides; and 2) a second nucleic acid molecule of the double-guide nucleic acid-targeting nucleic acid can comprise a minimum tracrRNA sequence comprising at least 60% identity to a tracrRNA from a prokaryote (e.g., S. pyogenes) or phage over 6 contiguous nucleotides and wherein the minimum tracrRNA sequence has a length from 5-30 nucleotides; a 3′ tracrRNA that comprises at least 60% identity to a tracrRNA from a bacterium (e.g., S. pyogenes) over 6 contiguous nucleotides and wherein the 3′ tracrRNA comprises a length from 10-20 nucleotides, and comprises a duplexed region; and/or a tracrRNA extension comprising 10-5000 nucleotides in length, or any combination thereof.

[0319] In some instances, a double-guide nucleic acid-targeting nucleic acid can comprise 1) a first nucleic acid molecule comprising a spacer extension sequence from 10-5000 nucleotides in length; a spacer sequence of 12-30 nucleotides in length, wherein the spacer is at least 50% complementary to a target nucleic acid; a minimum CRISPR repeat comprising at least 60% identity to a crRNA from a prokaryote (e.g., S. pyogenes) or phage over 6 contiguous nucleotides and wherein the minimum CRISPR repeat has a length from 5-30 nucleotides, and at least 3 unpaired nucleotides of a bulge; and 2) a second nucleic acid molecule of the double-guide nucleic acid-targeting nucleic acid can comprise a minimum tracrRNA sequence comprising at least 60% identity to a tracrRNA from a prokaryote (e.g., S. pyogenes) or phage over 6 contiguous nucleotides and wherein the minimum tracrRNA sequence has a length from 5-30 nucleotides and at least 1 unpaired nucleotide of a bulge, wherein the lunpaired nucleotide of the bulge is located in the same bulge as the 3 unpaired nucleotides of the minimum CRISPR repeat; a 3′ tracrRNA that comprises at least 60% identity to a tracrRNA from a prokaryote (e.g., S. pyogenes) or phage over 6 contiguous nucleotides and wherein the 3′ tracrRNA comprises a length from 10-20 nucleotides, and comprises a duplexed region; a P-domain that starts from 1-5 nucleotides downstream of the duplex comprising the minimum CRISPR repeat and the minimum tracrRNA, comprises 1-10 nucleotides, comprises a sequence that can hybridize to a protospacer adjacent motif in a target nucleic acid, can form a hairpin, and is located in the 3′ tracrRNA region; and/or a tracrRNA extension comprising 10-5000 nucleotides in length, or any combination thereof.

### Complex of a Nucleic Acid-Targeting Nucleic Acid and a Site-Directed Polypeptide

[0320] A nucleic acid-targeting nucleic acid can interact with a site-directed polypeptide (e.g., a nucleic acid-guided nucleases, Cas9), thereby forming a complex. The nucleic acid-targeting nucleic acid can guide the site-directed polypeptide to a target nucleic acid.

[0321] In some embodiments, a nucleic acid-targeting nucleic acid can be engineered such that the complex (e.g., comprising a site-directed polypeptide and a nucleic acid-targeting nucleic acid) can bind outside of the cleavage site of the site-directed polypeptide. In this case, the target nucleic acid may not interact with the complex and the target nucleic acid can be excised (e.g., free from the complex).

[0322] In some embodiments, a nucleic acid-targeting nucleic acid can be engineered such that the complex can bind inside of the cleavage site of the site-directed polypeptide. In this case, the target nucleic acid can interact with the complex and the target nucleic acid can be bound (e.g., bound to the complex).

[0323] In some instances, a complex can comprise a site-directed polypeptide, wherein the site-directed polypeptide can comprise an amino acid sequence comprising at least 15% amino acid identity to a Cas9 from S. pyogenes, and two nucleic acid cleaving domains (i.e., an HNH domain and a RuvC domain); and a double-guide nucleic acid-targeting nucleic acid comprising 1) a first nucleic acid molecule comprising a spacer extension sequence from 10-5000 nucleotides in length; a spacer sequence of 12-30 nucleotides in length, wherein the spacer is at least 50% complementary to a target nucleic acid; and a minimum CRISPR repeat comprising at least 60% identity to a crRNA from a prokaryote (e.g., S. pyogenes) or phage over 6 contiguous nucleotides and wherein the minimum CRISPR repeat has a length from 5-30 nucleotides; and 2) a second nucleic acid molecule of the double-guide nucleic acid-targeting nucleic acid can comprise a minimum tracrRNA sequence comprising at least 60% identity to a tracrRNA from a prokaryote (e.g., S. pyogenes) or phage over 6 contiguous nucleotides and wherein the minimum tracrRNA sequence has a length from 5-30 nucleotides; a 3′ tracrRNA that comprises at least 60% identity to a tracrRNA from a bacterium (e.g., S. pyogenes) over 6 contiguous nucleotides and wherein the 3′ tracrRNA comprises a length from 10-20 nucleotides, and comprises a duplexed region; and/or a tracrRNA extension comprising 10-5000 nucleotides in length, or any combination thereof.

[0324] In some instances, a complex can comprise a site-directed polypeptide, wherein the site-directed polypeptide can comprise an amino acid sequence comprising at least 15% amino acid identity to a Cas9 from S. pyogenes, and two nucleic acid cleaving domains (i.e., an HNH domain and a RuvC domain); and, a double-guide nucleic acid-targeting nucleic acid comprising 1) a first nucleic acid molecule comprising a spacer extension sequence from 10-5000 nucleotides in length; a spacer sequence of 12-30 nucleotides in length, wherein the spacer is at least 50% complementary to a target nucleic acid; a minimum CRISPR repeat comprising at least 60% identity to a crRNA from a prokaryote (e.g., S. pyogenes) or phage over 6 contiguous nucleotides and wherein the minimum CRISPR repeat has a length from 5-30 nucleotides, and at least 3 unpaired nucleotides of a bulge; and 2) a second nucleic acid molecule of the double-guide nucleic acid-targeting nucleic acid can comprise a minimum tracrRNA sequence comprising at least 60% identity to a tracrRNA from a prokaryote (e.g., S. pyogenes) or phage over 6 contiguous nucleotides and wherein the minimum tracrRNA sequence has a length from 5-30 nucleotides and at least 1 unpaired nucleotide of a bulge, wherein the lunpaired nucleotide of the bulge is located in the same bulge as the 3 unpaired nucleotides of the minimum CRISPR repeat; a 3′ tracrRNA that comprises at least 60% identity to a tracrRNA from a prokaryote (e.g., S. pyogenes) or phage over 6 contiguous nucleotides and wherein the 3′ tracrRNA comprises a length from 10-20 nucleotides, and comprises a duplexed region; a P-domain that starts from 1-5 nucleotides downstream of the duplex comprising the minimum CRISPR repeat and the minimum tracrRNA, comprises 1-10 nucleotides, comprises a sequence that can hybridize to a protospacer adjacent motif in a target nucleic acid, can form a hairpin, and is located in the 3′ tracrRNA region; and/or a tracrRNA extension comprising 10-5000 nucleotides in length, or any combination thereof.

[0325] In some instances, a complex can comprise a site-directed polypeptide, wherein the site-directed polypeptide can comprise an amino acid sequence comprising at least 15% amino acid identity to a Cas9 from S. pyogenes and, two nucleic acid cleaving domains (i.e., an HNH domain and a RuvC domain); and, a nucleic acid-targeting nucleic acid comprising a spacer extension sequence from 10-5000 nucleotides in length; a spacer sequence of 12-30 nucleotides in length, wherein the spacer is at least 50% complementary to a target nucleic acid; a minimum CRISPR repeat comprising at least 60% identity to a crRNA from a prokaryote (e.g., S. pyogenes) or phage over 6, 7, or 8 contiguous nucleotides and wherein the minimum CRISPR repeat has a length from 5-30 nucleotides; a minimum tracrRNA sequence comprising at least 60% identity to a tracrRNA from a bacterium (e.g., S. pyogenes) over 6, 7, or 8 contiguous nucleotides and wherein the minimum tracrRNA sequence has a length from 5-30 nucleotides; a linker sequence that links the minimum CRISPR repeat and the minimum tracrRNA and comprises a length from 3-5000 nucleotides; a 3′ tracrRNA that comprises at least 60% identity to a tracrRNA from a prokaryote (e.g., S. pyogenes) or phage over 6, 7, or 8 contiguous nucleotides and wherein the 3′ tracrRNA comprises a length from 10-20 nucleotides, and comprises a duplexed region; and/or a tracrRNA extension comprising 10-5000 nucleotides in length, or any combination thereof. This nucleic acid-targeting nucleic acid can be referred to as a single guide nucleic acid-targeting nucleic acid.

[0326] In some instances, a complex can comprise a site-directed polypeptide, wherein the site-directed polypeptide can comprise an amino acid sequence comprising at least 15% amino acid identity to a Cas9 from S. pyogenes, and two nucleic acid cleaving domains (i.e., an HNH domain and a RuvC domain); and, a nucleic acid-targeting nucleic acid can comprising a spacer extension sequence from 10-5000 nucleotides in length; a spacer sequence of 12-30 nucleotides in length, wherein the spacer is at least 50% complementary to a target nucleic acid; a duplex comprising 1) a minimum CRISPR repeat comprising at least 60% identity to a crRNA from a prokaryote (e.g., S. pyogenes) or phage over 6 contiguous nucleotides and wherein the minimum CRISPR repeat has a length from 5-30 nucleotides, 2) a minimum tracrRNA sequence comprising at least 60% identity to a tracrRNA from a bacterium (e.g., S. pyogenes) over 6 contiguous nucleotides and wherein the minimum tracrRNA sequence has a length from 5-30 nucleotides, and 3) a bulge wherein the bulge comprises at least 3 unpaired nucleotides on the minimum CRISPR repeat strand of the duplex and at least 1 unpaired nucleotide on the minimum tracrRNA sequence strand of the duplex; a linker sequence that links the minimum CRISPR repeat and the minimum tracrRNA and comprises a length from 3-5000 nucleotides; a 3′ tracrRNA that comprises at least 60% identity to a tracrRNA from a prokaryote (e.g., S. pyogenes) or phage over 6 contiguous nucleotides, wherein the 3′ tracrRNA comprises a length from 10-20 nucleotides and comprises a duplexed region; a P-domain that starts from 1-5 nucleotides downstream of the duplex comprising the minimum CRISPR repeat and the minimum tracrRNA, comprises 1-10 nucleotides, comprises a sequence that can hybridize to a protospacer adjacent motif in a target nucleic acid, can form a hairpin, and is located in the 3′ tracrRNA region; and/or a tracrRNA extension comprising 10-5000 nucleotides in length, or any combination thereof. In some instances, a complex can comprise a site-directed polypeptide, wherein the site-directed polypeptide comprises an amino acid sequence comprising at least 15% amino acid identity to a Cas9 from S. pyogenes, two nucleic acid cleaving domains (i.e., an HNH domain and a RuvC domain), and a linker linking the site-directed polypeptide to a non-native sequence; and a double-guide nucleic acid-targeting nucleic acid comprising 1) a first nucleic acid molecule comprising a spacer extension sequence from 10-5000 nucleotides in length; a spacer sequence of 12-30 nucleotides in length, wherein the spacer is at least 50% complementary to a target nucleic acid; and a minimum CRISPR repeat comprising at least 60% identity to a crRNA from a prokaryote (e.g., S. pyogenes) or phage over 6 contiguous nucleotides and wherein the minimum CRISPR repeat has a length from 5-30 nucleotides; and 2) a second nucleic acid molecule of the double-guide nucleic acid-targeting nucleic acid can comprise a minimum tracrRNA sequence comprising at least 60% identity to a tracrRNA from a prokaryote (e.g., S. pyogenes) or phage over 6 contiguous nucleotides and wherein the minimum tracrRNA sequence has a length from 5-30 nucleotides; a 3′ tracrRNA that comprises at least 60% identity to a tracrRNA from a bacterium (e.g., S. pyogenes) over 6 contiguous nucleotides and wherein the 3′ tracrRNA comprises a length from 10-20 nucleotides, and comprises a duplexed region; and/or a tracrRNA extension comprising 10-5000 nucleotides in length, or any combination thereof.

[0327] In some instances, a complex can comprise a site-directed polypeptide, wherein the site-directed polypeptide comprises an amino acid sequence comprising at least 15% amino acid identity to a Cas9 from S. pyogenes, two nucleic acid cleaving domains (i.e., an HNH domain and a RuvC domain), and a linker linking the site-directed polypeptide to a non-native sequence; and a double-guide nucleic acid-targeting nucleic acid comprising 1) a first nucleic acid molecule comprising a spacer extension sequence from 10-5000 nucleotides in length; a spacer sequence of 12-30 nucleotides in length, wherein the spacer is at least 50% complementary to a target nucleic acid; a minimum CRISPR repeat comprising at least 60% identity to a crRNA from a prokaryote (e.g., S. pyogenes) or phage over 6 contiguous nucleotides and wherein the minimum CRISPR repeat has a length from 5-30 nucleotides, and at least 3 unpaired nucleotides of a bulge; and 2) a second nucleic acid molecule of the double-guide nucleic acid-targeting nucleic acid can comprise a minimum tracrRNA sequence comprising at least 60% identity to a tracrRNA from a prokaryote (e.g., S. pyogenes) or phage over 6 contiguous nucleotides and wherein the minimum tracrRNA sequence has a length from 5-30 nucleotides and at least 1 unpaired nucleotide of a bulge, wherein the lunpaired nucleotide of the bulge is located in the same bulge as the 3 unpaired nucleotides of the minimum CRISPR repeat; a 3′ tracrRNA that comprises at least 60% identity to a tracrRNA from a prokaryote (e.g., S. pyogenes) or phage over 6 contiguous nucleotides and wherein the 3′ tracrRNA comprises a length from 10-20 nucleotides, and comprises a duplexed region; a P-domain that starts from 1-5 nucleotides downstream of the duplex comprising the minimum CRISPR repeat and the minimum tracrRNA, comprises 1-10 nucleotides, comprises a sequence that can hybridize to a protospacer adjacent motif in a target nucleic acid, can form a hairpin, and is located in the 3′ tracrRNA region; and/or a tracrRNA extension comprising 10-5000 nucleotides in length, or any combination thereof.

[0328] In some instances, a complex can comprise a site-directed polypeptide, wherein the site-directed polypeptide comprises an amino acid sequence comprising at least 15% amino acid identity to a Cas9 from S. pyogenes, two nucleic acid cleaving domains (i.e., an HNH domain and a RuvC domain), and a linker linking the site-directed polypeptide to a non-native sequence; and a nucleic acid-targeting nucleic acid comprising a spacer extension sequence from 10-5000 nucleotides in length; a spacer sequence of 12-30 nucleotides in length, wherein the spacer is at least 50% complementary to a target nucleic acid; a minimum CRISPR repeat comprising at least 60% identity to a crRNA from a prokaryote (e.g., S. pyogenes) or phage over 6, 7, or 8 contiguous nucleotides and wherein the minimum CRISPR repeat has a length from 5-30 nucleotides; a minimum tracrRNA sequence comprising at least 60% identity to a tracrRNA from a bacterium (e.g., S. pyogenes) over 6, 7, or 8 contiguous nucleotides and wherein the minimum tracrRNA sequence has a length from 5-30 nucleotides; a linker sequence that links the minimum CRISPR repeat and the minimum tracrRNA and comprises a length from 3-5000 nucleotides; a 3′ tracrRNA that comprises at least 60% identity to a tracrRNA from a prokaryote (e.g., S. pyogenes) or phage over 6, 7, or 8 contiguous nucleotides and wherein the 3′ tracrRNA comprises a length from 10-20 nucleotides, and comprises a duplexed region; and/or a tracrRNA extension comprising 10-5000 nucleotides in length, or any combination thereof. This nucleic acid-targeting nucleic acid can be referred to as a single guide nucleic acid-targeting nucleic acid.

[0329] In some instances, a complex can comprise a site-directed polypeptide, wherein the site-directed polypeptide comprises an amino acid sequence comprising at least 15% amino acid identity to a Cas9 from S. pyogenes, two nucleic acid cleaving domains (i.e., an HNH domain and a RuvC domain), and a linker linking the site-directed polypeptide to a non-native sequence; and nucleic acid-targeting nucleic acid can comprising a spacer extension sequence from 10-5000 nucleotides in length; a spacer sequence of 12-30 nucleotides in length, wherein the spacer is at least 50% complementary to a target nucleic acid; a duplex comprising 1) a minimum CRISPR repeat comprising at least 60% identity to a crRNA from a prokaryote (e.g., S. pyogenes) or phage over 6 contiguous nucleotides and wherein the minimum CRISPR repeat has a length from 5-30 nucleotides, 2) a minimum tracrRNA sequence comprising at least 60% identity to a tracrRNA from a bacterium (e.g., S. pyogenes) over 6 contiguous nucleotides and wherein the minimum tracrRNA sequence has a length from 5-30 nucleotides, and 3) a bulge wherein the bulge comprises at least 3 unpaired nucleotides on the minimum CRISPR repeat strand of the duplex and at least 1 unpaired nucleotide on the minimum tracrRNA sequence strand of the duplex; a linker sequence that links the minimum CRISPR repeat and the minimum tracrRNA and comprises a length from 3-5000 nucleotides; a 3′ tracrRNA that comprises at least 60% identity to a tracrRNA from a prokaryote (e.g., S. pyogenes) or phage over 6 contiguous nucleotides, wherein the 3′ tracrRNA comprises a length from 10-20 nucleotides and comprises a duplexed region; a P-domain that starts from 1-5 nucleotides downstream of the duplex comprising the minimum CRISPR repeat and the minimum tracrRNA, comprises 1-10 nucleotides, comprises a sequence that can hybridize to a protospacer adjacent motif in a target nucleic acid, can form a hairpin, and is located in the 3′ tracrRNA region; and/or a tracrRNA extension comprising 10-5000 nucleotides in length, or any combination thereof.

[0330] In some instances, a complex can comprise a site-directed polypeptide, wherein the site-directed polypeptide comprises at least 15% amino acid identity to a Cas9 from S. pyogenes, two nucleic acid cleaving domains (i.e., an HNH domain and a RuvC domain), wherein the site-directed polypeptide comprises a mutation in one or both of the nucleic acid cleaving domains that reduces the cleaving activity of the nuclease domains by at least 50%; and a double-guide nucleic acid-targeting nucleic acid comprising 1) a first nucleic acid molecule comprising a spacer extension sequence from 10-5000 nucleotides in length; a spacer sequence of 12-30 nucleotides in length, wherein the spacer is at least 50% complementary to a target nucleic acid; and a minimum CRISPR repeat comprising at least 60% identity to a crRNA from a prokaryote (e.g., S. pyogenes) or phage over 6 contiguous nucleotides and wherein the minimum CRISPR repeat has a length from 5-30 nucleotides; and 2) a second nucleic acid molecule of the double-guide nucleic acid-targeting nucleic acid can comprise a minimum tracrRNA sequence comprising at least 60% identity to a tracrRNA from a prokaryote (e.g., S. pyogenes) or phage over 6 contiguous nucleotides and wherein the minimum tracrRNA sequence has a length from 5-30 nucleotides; a 3′ tracrRNA that comprises at least 60% identity to a tracrRNA from a bacterium (e.g., S. pyogenes) over 6 contiguous nucleotides and wherein the 3′ tracrRNA comprises a length from 10-20 nucleotides, and comprises a duplexed region; and/or a tracrRNA extension comprising 10-5000 nucleotides in length, or any combination thereof.

[0331] In some instances, a complex can comprise a site-directed polypeptide, wherein the site-directed polypeptide comprises at least 15% amino acid identity to a Cas9 from S. pyogenes, two nucleic acid cleaving domains (i.e., an HNH domain and a RuvC domain), wherein the site-directed polypeptide comprises a mutation in one or both of the nucleic acid cleaving domains that reduces the cleaving activity of the nuclease domains by at least 50%; and a double-guide nucleic acid-targeting nucleic acid comprising 1) a first nucleic acid molecule comprising a spacer extension sequence from 10-5000 nucleotides in length; a spacer sequence of 12-30 nucleotides in length, wherein the spacer is at least 50% complementary to a target nucleic acid; a minimum CRISPR repeat comprising at least 60% identity to a crRNA from a prokaryote (e.g., S. pyogenes) or phage over 6 contiguous nucleotides and wherein the minimum CRISPR repeat has a length from 5-30 nucleotides, and at least 3 unpaired nucleotides of a bulge; and 2) a second nucleic acid molecule of the double-guide nucleic acid-targeting nucleic acid can comprise a minimum tracrRNA sequence comprising at least 60% identity to a tracrRNA from a prokaryote (e.g., S. pyogenes) or phage over 6 contiguous nucleotides and wherein the minimum tracrRNA sequence has a length from 5-30 nucleotides and at least 1 unpaired nucleotide of a bulge, wherein the lunpaired nucleotide of the bulge is located in the same bulge as the 3 unpaired nucleotides of the minimum CRISPR repeat; a 3′ tracrRNA that comprises at least 60% identity to a tracrRNA from a prokaryote (e.g., S. pyogenes) or phage over 6 contiguous nucleotides and wherein the 3′ tracrRNA comprises a length from 10-20 nucleotides, and comprises a duplexed region; a P-domain that starts from 1-5 nucleotides downstream of the duplex comprising the minimum CRISPR repeat and the minimum tracrRNA, comprises 1-10 nucleotides, comprises a sequence that can hybridize to a protospacer adjacent motif in a target nucleic acid, can form a hairpin, and is located in the 3′ tracrRNA region; and/or a tracrRNA extension comprising 10-5000 nucleotides in length, or any combination thereof.

[0332] In some instances, a complex can comprise a site-directed polypeptide, wherein the site-directed polypeptide comprises at least 15% amino acid identity to a Cas9 from S. pyogenes, two nucleic acid cleaving domains (i.e., an HNH domain and a RuvC domain), wherein the site-directed polypeptide comprises a mutation in one or both of the nucleic acid cleaving domains that reduces the cleaving activity of the nuclease domains by at least 50%; and nucleic acid-targeting nucleic acid comprising a spacer extension sequence from 10-5000 nucleotides in length; a spacer sequence of 12-30 nucleotides in length, wherein the spacer is at least 50% complementary to a target nucleic acid; a minimum CRISPR repeat comprising at least 60% identity to a crRNA from a prokaryote (e.g., S. pyogenes) or phage over 6, 7, or 8 contiguous nucleotides and wherein the minimum CRISPR repeat has a length from 5-30 nucleotides; a minimum tracrRNA sequence comprising at least 60% identity to a tracrRNA from a bacterium (e.g., S. pyogenes) over 6, 7, or 8 contiguous nucleotides and wherein the minimum tracrRNA sequence has a length from 5-30 nucleotides; a linker sequence that links the minimum CRISPR repeat and the minimum tracrRNA and comprises a length from 3-5000 nucleotides; a 3′ tracrRNA that comprises at least 60% identity to a tracrRNA from a prokaryote (e.g., S. pyogenes) or phage over 6, 7, or 8 contiguous nucleotides and wherein the 3′ tracrRNA comprises a length from 10-20 nucleotides, and comprises a duplexed region; and/or a tracrRNA extension comprising 10-5000 nucleotides in length, or any combination thereof. This nucleic acid-targeting nucleic acid can be referred to as a single guide nucleic acid-targeting nucleic acid.

[0333] In some instances, a complex can comprise a site-directed polypeptide, wherein the site-directed polypeptide comprises at least 15% amino acid identity to a Cas9 from S. pyogenes, two nucleic acid cleaving domains (i.e., an HNH domain and a RuvC domain), wherein the site-directed polypeptide comprises a mutation in one or both of the nucleic acid cleaving domains that reduces the cleaving activity of the nuclease domains by at least 50%; and nucleic acid-targeting nucleic acid can comprising a spacer extension sequence from 10-5000 nucleotides in length; a spacer sequence of 12-30 nucleotides in length, wherein the spacer is at least 50% complementary to a target nucleic acid; a duplex comprising 1) a minimum CRISPR repeat comprising at least 60% identity to a crRNA from a prokaryote (e.g., S. pyogenes) or phage over 6 contiguous nucleotides and wherein the minimum CRISPR repeat has a length from 5-30 nucleotides, 2) a minimum tracrRNA sequence comprising at least 60% identity to a tracrRNA from a bacterium (e.g., S. pyogenes) over 6 contiguous nucleotides and wherein the minimum tracrRNA sequence has a length from 5-30 nucleotides, and 3) a bulge wherein the bulge comprises at least 3 unpaired nucleotides on the minimum CRISPR repeat strand of the duplex and at least 1 unpaired nucleotide on the minimum tracrRNA sequence strand of the duplex; a linker sequence that links the minimum CRISPR repeat and the minimum tracrRNA and comprises a length from 3-5000 nucleotides; a 3′ tracrRNA that comprises at least 60% identity to a tracrRNA from a prokaryote (e.g., S. pyogenes) or phage over 6 contiguous nucleotides, wherein the 3′ tracrRNA comprises a length from 10-20 nucleotides and comprises a duplexed region; a P-domain that starts from 1-5 nucleotides downstream of the duplex comprising the minimum CRISPR repeat and the minimum tracrRNA, comprises 1-10 nucleotides, comprises a sequence that can hybridize to a protospacer adjacent motif in a target nucleic acid, can form a hairpin, and is located in the 3′ tracrRNA region; and/or a tracrRNA extension comprising 10-5000 nucleotides in length, or any combination thereof.

[0334] In some instances, a complex can comprise a site-directed polypeptide, wherein the site-directed polypeptide comprises at least 15% amino acid identity to a Cas9 from S. pyogenes, two nucleic acid cleaving domains (i.e., an HNH domain and a RuvC domain), wherein the site-directed polypeptide comprises a mutation in one or both of the nucleic acid cleaving domains that reduces the cleaving activity of the nuclease domains by at least 50%; and a double-guide nucleic acid-targeting nucleic acid comprising 1) a first nucleic acid molecule comprising a spacer extension sequence from 10-5000 nucleotides in length; a spacer sequence of 12-30 nucleotides in length, wherein the spacer is at least 50% complementary to a target nucleic acid; and a minimum CRISPR repeat comprising at least 60% identity to a crRNA from a prokaryote (e.g., S. pyogenes) or phage over 6 contiguous nucleotides and wherein the minimum CRISPR repeat has a length from 5-30 nucleotides; and 2) a second nucleic acid molecule of the double-guide nucleic acid-targeting nucleic acid can comprise a minimum tracrRNA sequence comprising at least 60% identity to a tracrRNA from a prokaryote (e.g., S. pyogenes) or phage over 6 contiguous nucleotides and wherein the minimum tracrRNA sequence has a length from 5-30 nucleotides; a 3′ tracrRNA that comprises at least 60% identity to a tracrRNA from a bacterium (e.g., S. pyogenes) over 6 contiguous nucleotides and wherein the 3′ tracrRNA comprises a length from 10-20 nucleotides, and comprises a duplexed region; and/or a tracrRNA extension comprising 10-5000 nucleotides in length, or any combination thereof.

[0335] In some instances, a complex can comprise a site-directed polypeptide, wherein the site-directed polypeptide comprises at least 15% amino acid identity to a Cas9 from S. pyogenes, two nucleic acid cleaving domains (i.e., an HNH domain and a RuvC domain), wherein the site-directed polypeptide comprises a mutation in one or both of the nucleic acid cleaving domains that reduces the cleaving activity of the nuclease domains by at least 50%; and a double-guide nucleic acid-targeting nucleic acid comprising 1) a first nucleic acid molecule comprising a spacer extension sequence from 10-5000 nucleotides in length; a spacer sequence of 12-30 nucleotides in length, wherein the spacer is at least 50% complementary to a target nucleic acid; a minimum CRISPR repeat comprising at least 60% identity to a crRNA from a prokaryote (e.g., S. pyogenes) or phage over 6 contiguous nucleotides and wherein the minimum CRISPR repeat has a length from 5-30 nucleotides, and at least 3 unpaired nucleotides of a bulge; and 2) a second nucleic acid molecule of the double-guide nucleic acid-targeting nucleic acid can comprise a minimum tracrRNA sequence comprising at least 60% identity to a tracrRNA from a prokaryote (e.g., S. pyogenes) or phage over 6 contiguous nucleotides and wherein the minimum tracrRNA sequence has a length from 5-30 nucleotides and at least 1 unpaired nucleotide of a bulge, wherein the lunpaired nucleotide of the bulge is located in the same bulge as the 3 unpaired nucleotides of the minimum CRISPR repeat; a 3′ tracrRNA that comprises at least 60% identity to a tracrRNA from a prokaryote (e.g., S. pyogenes) or phage over 6 contiguous nucleotides and wherein the 3′ tracrRNA comprises a length from 10-20 nucleotides, and comprises a duplexed region; a P-domain that starts from 1-5 nucleotides downstream of the duplex comprising the minimum CRISPR repeat and the minimum tracrRNA, comprises 1-10 nucleotides, comprises a sequence that can hybridize to a protospacer adjacent motif in a target nucleic acid, can form a hairpin, and is located in the 3′ tracrRNA region; and/or a tracrRNA extension comprising 10-5000 nucleotides in length, or any combination thereof.

[0336] In some instances, a complex can comprise a site-directed polypeptide, wherein the site-directed polypeptide comprises at least 15% amino acid identity to a Cas9 from S. pyogenes, two nucleic acid cleaving domains (i.e., an HNH domain and a RuvC domain), wherein the site-directed polypeptide comprises a mutation in one or both of the nucleic acid cleaving domains that reduces the cleaving activity of the nuclease domains by at least 50%; and nucleic acid-targeting nucleic acid comprising a spacer extension sequence from 10-5000 nucleotides in length; a spacer sequence of 12-30 nucleotides in length, wherein the spacer is at least 50% complementary to a target nucleic acid; a minimum CRISPR repeat comprising at least 60% identity to a crRNA from a prokaryote (e.g., S. pyogenes) or phage over 6, 7, or 8 contiguous nucleotides and wherein the minimum CRISPR repeat has a length from 5-30 nucleotides; a minimum tracrRNA sequence comprising at least 60% identity to a tracrRNA from a bacterium (e.g., S. pyogenes) over 6, 7, or 8 contiguous nucleotides and wherein the minimum tracrRNA sequence has a length from 5-30 nucleotides; a linker sequence that links the minimum CRISPR repeat and the minimum tracrRNA and comprises a length from 3-5000 nucleotides; a 3′ tracrRNA that comprises at least 60% identity to a tracrRNA from a prokaryote (e.g., S. pyogenes) or phage over 6, 7, or 8 contiguous nucleotides and wherein the 3′ tracrRNA comprises a length from 10-20 nucleotides, and comprises a duplexed region; and/or a tracrRNA extension comprising 10-5000 nucleotides in length, or any combination thereof. This nucleic acid-targeting nucleic acid can be referred to as a single guide nucleic acid-targeting nucleic acid.

[0337] In some instances, a complex can comprise a site-directed polypeptide, wherein the site-directed polypeptide comprises at least 15% amino acid identity to a Cas9 from S. pyogenes, two nucleic acid cleaving domains (i.e., an HNH domain and a RuvC domain), wherein the site-directed polypeptide comprises a mutation in one or both of the nucleic acid cleaving domains that reduces the cleaving activity of the nuclease domains by at least 50%; and a nucleic acid-targeting nucleic acid can comprising a spacer extension sequence from 10-5000 nucleotides in length; a spacer sequence of 12-30 nucleotides in length, wherein the spacer is at least 50% complementary to a target nucleic acid; a duplex comprising 1) a minimum CRISPR repeat comprising at least 60% identity to a crRNA from a prokaryote (e.g., S. pyogenes) or phage over 6 contiguous nucleotides and wherein the minimum CRISPR repeat has a length from 5-30 nucleotides, 2) a minimum tracrRNA sequence comprising at least 60% identity to a tracrRNA from a bacterium (e.g., S. pyogenes) over 6 contiguous nucleotides and wherein the minimum tracrRNA sequence has a length from 5-30 nucleotides, and 3) a bulge wherein the bulge comprises at least 3 unpaired nucleotides on the minimum CRISPR repeat strand of the duplex and at least 1 unpaired nucleotide on the minimum tracrRNA sequence strand of the duplex; a linker sequence that links the minimum CRISPR repeat and the minimum tracrRNA and comprises a length from 3-5000 nucleotides; a 3′ tracrRNA that comprises at least 60% identity to a tracrRNA from a prokaryote (e.g., S. pyogenes) or phage over 6 contiguous nucleotides, wherein the 3′ tracrRNA comprises a length from 10-20 nucleotides and comprises a duplexed region; a P-domain that starts from 1-5 nucleotides downstream of the duplex comprising the minimum CRISPR repeat and the minimum tracrRNA, comprises 1-10 nucleotides, comprises a sequence that can hybridize to a protospacer adjacent motif in a target nucleic acid, can form a hairpin, and is located in the 3′ tracrRNA region; and/or a tracrRNA extension comprising 10-5000 nucleotides in length, or any combination thereof.

[0338] In some instances, a complex can comprise a site-directed polypeptide, wherein the site-directed polypeptide comprises at least 15% amino acid identity to a Cas9 from S. pyogenes, two nucleic acid cleaving domains (i.e., an HNH domain and a RuvC domain), wherein the site-directed polypeptide comprises a mutation in one or both of the nucleic acid cleaving domains that reduces the cleaving activity of the nuclease domains by at least 50%; and a double-guide nucleic acid-targeting nucleic acid comprising 1) a first nucleic acid molecule comprising a spacer extension sequence from 10-5000 nucleotides in length; a spacer sequence of 12-30 nucleotides in length, wherein the spacer is at least 50% complementary to a target nucleic acid; and a minimum CRISPR repeat comprising at least 60% identity to a crRNA from a prokaryote (e.g., S. pyogenes) or phage over 6 contiguous nucleotides and wherein the minimum CRISPR repeat has a length from 5-30 nucleotides; and 2) a second nucleic acid molecule of the double-guide nucleic acid-targeting nucleic acid can comprise a minimum tracrRNA sequence comprising at least 60% identity to a tracrRNA from a prokaryote (e.g., S. pyogenes) or phage over 6 contiguous nucleotides and wherein the minimum tracrRNA sequence has a length from 5-30 nucleotides; a 3′ tracrRNA that comprises at least 60% identity to a tracrRNA from a bacterium (e.g., S. pyogenes) over 6 contiguous nucleotides and wherein the 3′ tracrRNA comprises a length from 10-20 nucleotides, and comprises a duplexed region; and/or a tracrRNA extension comprising 10-5000 nucleotides in length, or any combination thereof.

[0339] In some instances, a complex can comprise a site-directed polypeptide, wherein the site-directed polypeptide comprises at least 15% amino acid identity to a Cas9 from S. pyogenes, and two nucleic acid cleaving domains, wherein one or both of the nucleic acid cleaving domains comprise at least 50% amino acid identity to a nuclease domain from Cas9 from S. pyogenes; and a double-guide nucleic acid-targeting nucleic acid comprising 1) a first nucleic acid molecule comprising a spacer extension sequence from 10-5000 nucleotides in length; a spacer sequence of 12-30 nucleotides in length, wherein the spacer is at least 50% complementary to a target nucleic acid; a minimum CRISPR repeat comprising at least 60% identity to a crRNA from a prokaryote (e.g., S. pyogenes) or phage over 6 contiguous nucleotides and wherein the minimum CRISPR repeat has a length from 5-30 nucleotides, and at least 3 unpaired nucleotides of a bulge; and 2) a second nucleic acid molecule of the double-guide nucleic acid-targeting nucleic acid can comprise a minimum tracrRNA sequence comprising at least 60% identity to a tracrRNA from a prokaryote (e.g., S. pyogenes) or phage over 6 contiguous nucleotides and wherein the minimum tracrRNA sequence has a length from 5-30 nucleotides and at least 1 unpaired nucleotide of a bulge, wherein the lunpaired nucleotide of the bulge is located in the same bulge as the 3 unpaired nucleotides of the minimum CRISPR repeat; a 3′ tracrRNA that comprises at least 60% identity to a tracrRNA from a prokaryote (e.g., S. pyogenes) or phage over 6 contiguous nucleotides and wherein the 3′ tracrRNA comprises a length from 10-20 nucleotides, and comprises a duplexed region; a P-domain that starts from 1-5 nucleotides downstream of the duplex comprising the minimum CRISPR repeat and the minimum tracrRNA, comprises 1-10 nucleotides, comprises a sequence that can hybridize to a protospacer adjacent motif in a target nucleic acid, can form a hairpin, and is located in the 3′ tracrRNA region; and/or a tracrRNA extension comprising 10-5000 nucleotides in length, or any combination thereof.

[0340] In some instances, a complex can comprise a site-directed polypeptide, wherein the site-directed polypeptide comprises at least 15% amino acid identity to a Cas9 from S. pyogenes, and two nucleic acid cleaving domains, wherein one or both of the nucleic acid cleaving domains comprise at least 50% amino acid identity to a nuclease domain from Cas9 from S. pyogenes; and nucleic acid-targeting nucleic acid comprising a spacer extension sequence from 10-5000 nucleotides in length; a spacer sequence of 12-30 nucleotides in length, wherein the spacer is at least 50% complementary to a target nucleic acid; a minimum CRISPR repeat comprising at least 60% identity to a crRNA from a prokaryote (e.g., S. pyogenes) or phage over 6, 7, or 8 contiguous nucleotides and wherein the minimum CRISPR repeat has a length from 5-30 nucleotides; a minimum tracrRNA sequence comprising at least 60% identity to a tracrRNA from a bacterium (e.g., S. pyogenes) over 6, 7, or 8 contiguous nucleotides and wherein the minimum tracrRNA sequence has a length from 5-30 nucleotides; a linker sequence that links the minimum CRISPR repeat and the minimum tracrRNA and comprises a length from 3-5000 nucleotides; a 3′ tracrRNA that comprises at least 60% identity to a tracrRNA from a prokaryote (e.g., S. pyogenes) or phage over 6, 7, or 8 contiguous nucleotides and wherein the 3′ tracrRNA comprises a length from 10-20 nucleotides, and comprises a duplexed region; and/or a tracrRNA extension comprising 10-5000 nucleotides in length, or any combination thereof. This nucleic acid-targeting nucleic acid can be referred to as a single guide nucleic acid-targeting nucleic acid.

[0341] In some instances, a complex can comprise a site-directed polypeptide, wherein the site-directed polypeptide comprises at least 15% amino acid identity to a Cas9 from S. pyogenes, and two nucleic acid cleaving domains, wherein one or both of the nucleic acid cleaving domains comprise at least 50% amino acid identity to a nuclease domain from Cas9 from S. pyogenes; and a nucleic acid-targeting nucleic acid can comprising a spacer extension sequence from 10-5000 nucleotides in length; a spacer sequence of 12-30 nucleotides in length, wherein the spacer is at least 50% complementary to a target nucleic acid; a duplex comprising 1) a minimum CRISPR repeat comprising at least 60% identity to a crRNA from a prokaryote (e.g., S. pyogenes) or phage over 6 contiguous nucleotides and wherein the minimum CRISPR repeat has a length from 5-30 nucleotides, 2) a minimum tracrRNA sequence comprising at least 60% identity to a tracrRNA from a bacterium (e.g., S. pyogenes) over 6 contiguous nucleotides and wherein the minimum tracrRNA sequence has a length from 5-30 nucleotides, and 3) a bulge wherein the bulge comprises at least 3 unpaired nucleotides on the minimum CRISPR repeat strand of the duplex and at least 1 unpaired nucleotide on the minimum tracrRNA sequence strand of the duplex; a linker sequence that links the minimum CRISPR repeat and the minimum tracrRNA and comprises a length from 3-5000 nucleotides; a 3′ tracrRNA that comprises at least 60% identity to a tracrRNA from a prokaryote (e.g., S. pyogenes) or phage over 6 contiguous nucleotides, wherein the 3′ tracrRNA comprises a length from 10-20 nucleotides and comprises a duplexed region; a P-domain that starts from 1-5 nucleotides downstream of the duplex comprising the minimum CRISPR repeat and the minimum tracrRNA, comprises 1-10 nucleotides, comprises a sequence that can hybridize to a protospacer adjacent motif in a target nucleic acid, can form a hairpin, and is located in the 3′ tracrRNA region; and/or a tracrRNA extension comprising 10-5000 nucleotides in length, or any combination thereof.

[0342] Any nucleic acid-targeting nucleic acid of the disclosure, a site-directed polypeptide of the disclosure, an effector protein, a multiplexed genetic targeting agent, a donor polynucleotide, a tandem fusion protein, a reporter element, a genetic element of interest, a component of a split system and/or any nucleic acid or proteinaceous molecule necessary to carry out the embodiments of the methods of the disclosure may be recombinant, purified and/or isolated.

Nucleic Acids Encoding a Nucleic Acid-Targeting Nucleic Acid and/or a Site-Directed Polypeptide

[0343] The present disclosure provides for a nucleic acid comprising a nucleotide sequence encoding a nucleic acid-targeting nucleic acid of the disclosure, a site-directed polypeptide of the disclosure, an effector protein, a multiplexed genetic targeting agent, a donor polynucleotide, a tandem fusion protein, a reporter element, a genetic element of interest, a component of a split system and/or any nucleic acid or proteinaceous molecule necessary to carry out the embodiments of the methods of the disclosure. In some embodiments, the nucleic acid encoding a nucleic acid-targeting nucleic acid of the disclosure, a site-directed polypeptide of the disclosure, an effector protein, a multiplexed genetic targeting agent, a donor polynucleotide, a tandem fusion protein, a reporter element, a genetic element of interest, a component of a split system and/or any nucleic acid or proteinaceous molecule necessary to carry out the embodiments of the methods of the disclosure can be a vector (e.g., a recombinant expression vector).

[0344] In some embodiments, the recombinant expression vector can be a viral construct, (e.g., a recombinant adeno-associated virus construct), a recombinant adenoviral construct, a recombinant lentiviral construct, a recombinant retroviral construct, etc.

[0345] Suitable expression vectors can include, but are not limited to, viral vectors (e.g. viral vectors based on vaccinia virus, poliovirus, adenovirus, adeno-associated virus, SV40, herpes simplex virus, human immunodeficiency virus, a retroviral vector (e.g., Murine Leukemia Virus, spleen necrosis virus, and vectors derived from retroviruses such as Rous Sarcoma Virus, Harvey Sarcoma Virus, avian leukosis virus, a lentivirus, human immunodeficiency virus, myeloproliferative sarcoma virus, and mammary tumor virus), plant vectors (e.g., T-DNA vector), and the like. The following vectors can be provided by way of example, for eukaryotic host cells: pXT1, pSG5, pSVK3, pBPV, pMSG, and pSVLSV40 (Pharmacia). Other vectors may be used so long as they are compatible with the host cell.

[0346] In some instances, a vector can be a linearized vector. A linearized vector can comprise a site-directed polypeptide and/or a nucleic acid-targeting nucleic acid. A linearized vector may not be a circular plasmid. A linearized vector can comprise a double-stranded break. A linearized vector may comprise a sequence encoding a fluorescent protein (e.g., orange fluorescent protein (OFP)). A linearized vector may comprise a sequence encoding an antigen (e.g., CD4). A linearized vector can be linearized (e.g., cut) in a region of the vector encoding parts of the nucleic acid-targeting nucleic acid. For example a linearized vector can be linearized (e.g., cut) in a region of the nucleic acid-targeting nucleic acid 5′ to the crRNA portion of the nucleic acid-targeting nucleic acid. A linearized vector can be linearized (e.g., cut) in a region of the nucleic acid-targeting nucleic acid 3′ to the spacer extension sequence of the nucleic acid-targeting nucleic acid. A linearized vector can be linearized (e.g., cut) in a region of the nucleic acid-targeting nucleic acid encoding the crRNA sequence of the nucleic acid-targeting nucleic acid. In some instances, a linearized vector or a closed supercoiled vector comprises a sequence encoding a site-directed polypeptide (e.g., Cas9), a promoter driving expression of the sequence encoding the site-directed polypeptide (e.g., CMV promoter), a sequence encoding a linker (e.g., 2A), a sequence encoding a marker (e.g., CD4 or OFP), a sequence encoding portion of a nucleic acid-targeting nucleic acid, a promoter driving expression of the sequence encoding a portion of the nucleic acid-targeting nucleic acid, and a sequence encoding a selectable marker (e.g., ampicillin), or any combination thereof.

[0347] A vector can comprise a transcription and/or translation control element. Depending on the host/vector system utilized, any of a number of suitable transcription and translation control elements, including constitutive and inducible promoters, transcription enhancer elements, transcription terminators, etc. may be used in the expression vector.

[0348] In some embodiments, a nucleotide sequence encoding a nucleic acid-targeting nucleic acid of the disclosure, a site-directed polypeptide of the disclosure, an effector protein, a multiplexed genetic targeting agent, a donor polynucleotide, a tandem fusion protein, a reporter element, a genetic element of interest, a component of a split system and/or any nucleic acid or proteinaceous molecule necessary to carry out the embodiments of the methods of the disclosure can be operably linked to a control element (e.g., a transcriptional control element), such as a promoter. The transcriptional control element may be functional in a eukaryotic cell, (e.g., a mammalian cell), a prokaryotic cell (e.g., bacterial or archacal cell). In some embodiments, a nucleotide sequence encoding a nucleic acid-targeting nucleic acid of the disclosure, a site-directed polypeptide of the disclosure, an effector protein, a multiplexed genetic targeting agent, a donor polynucleotide, a tandem fusion protein, a reporter element, a genetic element of interest, a component of a split system and/or any nucleic acid or proteinaceous molecule necessary to carry out the embodiments of the methods of the disclosure can be operably linked to multiple control elements. Operable linkage to multiple control elements can allow expression of the nucleotide sequence encoding a nucleic acid-targeting nucleic acid of the disclosure, a site-directed polypeptide of the disclosure, an effector protein, a multiplexed genetic targeting agent, a donor polynucleotide, a tandem fusion protein, a reporter element, a genetic element of interest, a component of a split system and/or any nucleic acid or proteinaceous molecule necessary to carry out the embodiments of the methods of the disclosure in either prokaryotic or eukaryotic cells.

[0349] Non-limiting examples of suitable eukaryotic promoters (i.e. promoters functional in a eukaryotic cell) can include those from cytomegalovirus (CMV) immediate early, herpes simplex virus (HSV) thymidine kinase, early and late SV40, long terminal repeats (LTRs) from retrovirus, human elongation factor-1 promoter (EF1), a hybrid construct comprising the cytomegalovirus (CMV) enhancer fused to the chicken beta-active promoter (CAG), murine stem cell virus promoter (MSCV), phosphoglycerate kinase-1 locus promoter (PGK) and mouse metallothionein-I. The promoter can be a fungi promoter. The promoter can be a plant promoter. A database of plant promoter can be found (e.g., PlantProm). The expression vector may also contain a ribosome binding site for translation initiation and a transcription terminator. The expression vector may also include appropriate sequences for amplifying expression. The expression vector may also include nucleotide sequences encoding non-native tags (e.g., 6×His tag, hemagglutinin tag, green fluorescent protein, etc.) that are fused to the site-directed polypeptide, thus resulting in a fusion protein.

[0350] In some embodiments, a nucleotide sequence or sequences encoding a nucleic acid-targeting nucleic acid of the disclosure, a site-directed polypeptide of the disclosure, an effector protein, a multiplexed genetic targeting agent, a donor polynucleotide, a tandem fusion protein, a reporter element, a genetic element of interest, a component of a split system and/or any nucleic acid or proteinaceous molecule necessary to carry out the embodiments of the methods of the disclosure can be operably linked to an inducible promoter (e.g., heat shock promoter, tetracycline-regulated promoter, steroid-regulated promoter, metal-regulated promoter, estrogen receptor-regulated promoter, etc.). In some embodiments, a nucleotide sequence encoding a nucleic acid-targeting nucleic acid of the disclosure, a site-directed polypeptide of the disclosure, an effector protein, a multiplexed genetic targeting agent, a donor polynucleotide, a tandem fusion protein, a reporter element, a genetic element of interest, a component of a split system and/or any nucleic acid or proteinaceous molecule necessary to carry out the embodiments of the methods of the disclosure can be operably linked to a constitutive promoter (e.g., CMV promoter, UBC promoter). In some embodiments, the nucleotide sequence can be operably linked to a spatially restricted and/or temporally restricted promoter (e.g., a tissue specific promoter, a cell type specific promoter, etc.).

[0351] A nucleotide sequence or sequences encoding a nucleic acid-targeting nucleic acid of the disclosure, a site-directed polypeptide of the disclosure, an effector protein, a multiplexed genetic targeting agent, a donor polynucleotide, a tandem fusion protein, a reporter element, a genetic element of interest, a component of a split system and/or any nucleic acid or proteinaceous molecule necessary to carry out the embodiments of the methods of the disclosure can be packaged into or on the surface of biological compartments for delivery to cells. Biological compartments can include, but are not limited to, viruses (lentivirus, adenovirus), nanospheres, liposomes, quantum dots, nanoparticles, polyethylene glycol particles, hydrogels, and micelles.

[0352] Introduction of the complexes, polypeptides, and nucleic acids of the disclosure into cells can occur by viral or bacteriophage infection, transfection, conjugation, protoplast fusion, lipofection, electroporation, calcium phosphate precipitation, polyethyleneimine (PEI)-mediated transfection, DEAE-dextran mediated transfection, liposome-mediated transfection, particle gun technology, calcium phosphate precipitation, direct micro-injection, nanoparticle-mediated nucleic acid delivery, and the like.

### Transgenic Cells and Organisms

[0353] The disclosure provides for transgenic cells and organisms. The nucleic acid of a genetically modified host cell and/or transgenic organism can be targeted for genome engineering.

[0354] Exemplary cells that can be used to generate transgenic cells according to the methods of the disclosure can include, but are not limited to, HeLa cell, Chinese Hamster Ovary cell, 293-T cell, a pheochromocytoma, a neuroblastomas fibroblast, a rhabdomyosarcoma, a dorsal root ganglion cell, a NSO cell, Tobacco BY-2, CV-I (ATCC CCL 70). COS-I (ATCC CRL 1650), COS-7 (ATCC CRL 1651), CHO-KI (ATCC CCL 61), 3T3 (ATCC CCL 92), NIH/3T3 (ATCC CRL 1658), HeLa (ATCC CCL 2), C 1271 (ATCC CRL 1616), BS-C-I (ATCC CCL 26), MRC-5 (ATCC CCL 171), L-cells, HEK-293 (ATCC CRL1 573) and PC 12 (ATCC CRL-1721), HEK293T (ATCC CRL-11268), RBL (ATCC CRL-1378), SH-SY5Y (ATCC CRL-2266), MDCK (ATCC CCL-34), SJ-RH30 (ATCC CRL-2061), HepG2 (ATCC HB-8065), ND7/23 (ECACC 92090903), CHO (ECACC 85050302), Vera (ATCC CCL 81), Caco-2 (ATCC HTB 37), K562 (ATCC CCL 243), Jurkat (ATCC TIB-152), Per.Có, Huvec (ATCC Human Primary PCS 100-010. Mouse CRL 2514, CRL 2515, CRL 2516), HuH-7D12 (ECACC 01042712), 293 (ATCC CRL 10852), A549 (ATCC CCL 185), IMR-90 (ATCC CCL 186), MCF-7 (ATC HTB-22). U-2 OS (ATCC HTB-96), and T84 (ATCC CCL 248), or any cell available at American Type Culture Collection (ATCC), or any combination thereof.

[0355] Organisms that can be transgenic can include bacteria, archaea, single-cell eukaryotes, plants, algae, fungi (e.g., yeast), invertebrates (e.g., fruit fly, cnidarian, echinoderm, nematode, etc), vertebrates (e.g., fish, amphibian, reptile, bird, mammal), mammals (e.g., a pig, a cow, a goat, a sheep, a rodent, a rat, a mouse, a non-human primate, a human, etc.), etc.

[0356] Transgenic organisms can comprise genetically modified cells. Transgenic organisms and/or genetically modified cells can comprise organisms and/or cells that have been genetically modified with an exogenous nucleic acid comprising a nucleotide sequence encoding nucleic acid-targeting nucleic acid of the disclosure, an effector protein, and/or a site-directed polypeptide, or any combination thereof.

[0357] A genetically modified cell can comprise an exogenous site-directed polypeptide and/or an exogenous nucleic acid comprising a nucleotide sequence encoding a site-directed polypeptide. Expression of the site-directed polypeptide in the cell may take 0.1, 0.2, 0.5, 1, 2, 3, 4, 5, 6, or more days. Cells, introduced with the site-directed polypeptide, may be grown for 0.1, 0.2, 0.5, 1, 2, 3, 4, 5, 6, 7, 8, 9, 10 or even more days before the cells can be removed from cell culture and/or host organism.

### Subjects

[0358] The disclosure provides for performing the methods of the disclosure in a subject. A subject can be a human. A subject can be a mammal (e.g., rat, mouse, cow, dog, pig, sheep, horse). A subject can be a vertebrate or an invertebrate. A subject can be a laboratory animal. A subject can be a patient. A subject can be suffering from a disease. A subject can display symptoms of a disease. A subject may not display symptoms of a disease, but still have a disease. A subject can be under medical care of a caregiver (e.g., the subject is hospitalized and is treated by a physician). A subject can be a plant or a crop.

### Kits

[0359] The present disclosure provides kits for carrying out the methods of the disclosure. A kit can include one or more of: A nucleic acid-targeting nucleic acid of the disclosure, a polynucleotide encoding a nucleic acid-targeting nucleic acid, a site-directed polypeptide of the disclosure, a polynucleotide encoding a site-directed polypeptide, an effector protein, a polynucleotide encoding an effector protein, a multiplexed genetic targeting agent, a polynucleotide encoding a multiplexed genetic targeting agent, a donor polynucleotide, a tandem fusion protein, a polynucleotide encoding a tandem fusion protein, a reporter element, a genetic element of interest, a component of a split system and/or any nucleic acid or proteinaceous molecule necessary to carry out the embodiments of the methods of the disclosure, or any combination thereof.

[0360] A nucleic acid-targeting nucleic acid of the disclosure, a polynucleotide encoding a nucleic acid-targeting nucleic acid, a site-directed polypeptide of the disclosure, a polynucleotide encoding a site-directed polypeptide, an effector protein, a polynucleotide encoding an effector protein, a multiplexed genetic targeting agent, a polynucleotide encoding a multiplexed genetic targeting agent, a donor polynucleotide, a tandem fusion protein, a polynucleotide encoding a tandem fusion protein, a reporter element, a genetic element of interest, a component of a split system and/or any nucleic acid or proteinaceous molecule necessary to carry out the embodiments of the methods of the disclosure are described in detail above.

[0361] A kit can comprise: (1) a vector comprising a nucleotide sequence encoding a nucleic acid-targeting nucleic acid, and (2) a vector comprising a nucleotide sequence encoding the site-directed polypeptide and (2) a reagent for reconstitution and/or dilution of the vectors.

[0362] A kit can comprise: (1) a vector comprising (i) a nucleotide sequence encoding a nucleic acid-targeting nucleic acid, and (ii) a nucleotide sequence encoding the site-directed polypeptide and (2) a reagent for reconstitution and/or dilution of the vector.

[0363] A kit can comprise: (1) a vector comprising a nucleotide sequence encoding a nucleic acid-targeting nucleic acid, (2) a vector comprising a nucleotide sequence encoding the site-directed polypeptide, (3) a vector comprising a nucleotide sequence encoding an effector protein, a multiplexed genetic targeting agent, a donor polynucleotide, a tandem fusion protein, a reporter element, a genetic element of interest, a component of a split system and/or any nucleic acid or proteinaceous molecule necessary to carry out the embodiments of the methods of the disclosure, and (4) a reagent for reconstitution and/or dilution of the vectors.

[0364] A kit can comprise: (1) a vector comprising (i) a nucleotide sequence encoding a nucleic acid-targeting nucleic acid, (ii) a nucleotide sequence encoding the site-directed polypeptide, (2) a vector comprising a nucleotide sequence encoding an effector protein, a multiplexed genetic targeting agent, a donor polynucleotide, a tandem fusion protein, a reporter element, a genetic element of interest, a component of a split system and/or any nucleic acid or proteinaceous molecule necessary to carry out the embodiments of the methods of the disclosure, and (3) a reagent for reconstitution and/or dilution of the recombinant expression vectors.

[0365] In some instances, a kit can comprise a site-directed polypeptide (and/or a nucleic acid encoding the same), wherein the site-directed polypeptide can comprise an amino acid sequence comprising at least 15% amino acid identity to a Cas9 from S. pyogenes, and two nucleic acid cleaving domains (i.e., an HNH domain and a RuvC domain); and a double-guide nucleic acid-targeting nucleic acid (and/or a nucleic acid encoding the same) comprising 1) a first nucleic acid molecule comprising a spacer extension sequence from 10-5000 nucleotides in length; a spacer sequence of 12-30 nucleotides in length, wherein the spacer is at least 50% complementary to a target nucleic acid; and a minimum CRISPR repeat comprising at least 60% identity to a crRNA from a prokaryote (e.g., S. pyogenes) or phage over 6 contiguous nucleotides and wherein the minimum CRISPR repeat has a length from 5-30 nucleotides; and 2) a second nucleic acid molecule of the double-guide nucleic acid-targeting nucleic acid can comprise a minimum tracrRNA sequence comprising at least 60% identity to a tracrRNA from a prokaryote (e.g., S. pyogenes) or phage over 6 contiguous nucleotides and wherein the minimum tracrRNA sequence has a length from 5-30 nucleotides; a 3′ tracrRNA that comprises at least 60% identity to a tracrRNA from a bacterium (e.g., S. pyogenes) over 6 contiguous nucleotides and wherein the 3′ tracrRNA comprises a length from 10-20 nucleotides, and comprises a duplexed region; and/or a tracrRNA extension comprising 10-5000 nucleotides in length, or any combination thereof.

[0366] In some instances, a kit can comprise a site-directed polypeptide (and/or a nucleic acid encoding the same), wherein the site-directed polypeptide can comprise an amino acid sequence comprising at least 15% amino acid identity to a Cas9 from S. pyogenes, and two nucleic acid cleaving domains (i.e., an HNH domain and a RuvC domain); and, a double-guide nucleic acid-targeting nucleic acid (and/or a nucleic acid encoding the same) comprising 1) a first nucleic acid molecule comprising a spacer extension sequence from 10-5000 nucleotides in length; a spacer sequence of 12-30 nucleotides in length, wherein the spacer is at least 50% complementary to a target nucleic acid; a minimum CRISPR repeat comprising at least 60% identity to a crRNA from a prokaryote (e.g., S. pyogenes) or phage over 6 contiguous nucleotides and wherein the minimum CRISPR repeat has a length from 5-30 nucleotides, and at least 3 unpaired nucleotides of a bulge; and 2) a second nucleic acid molecule of the double-guide nucleic acid-targeting nucleic acid can comprise a minimum tracrRNA sequence comprising at least 60% identity to a tracrRNA from a prokaryote (e.g., S. pyogenes) or phage over 6 contiguous nucleotides and wherein the minimum tracrRNA sequence has a length from 5-30 nucleotides and at least 1 unpaired nucleotide of a bulge, wherein the lunpaired nucleotide of the bulge is located in the same bulge as the 3 unpaired nucleotides of the minimum CRISPR repeat; a 3′ tracrRNA that comprises at least 60% identity to a tracrRNA from a prokaryote (e.g., S. pyogenes) or phage over 6 contiguous nucleotides and wherein the 3′ tracrRNA comprises a length from 10-20 nucleotides, and comprises a duplexed region; a P-domain that starts from 1-5 nucleotides downstream of the duplex comprising the minimum CRISPR repeat and the minimum tracrRNA, comprises 1-10 nucleotides, comprises a sequence that can hybridize to a protospacer adjacent motif in a target nucleic acid, can form a hairpin, and is located in the 3′ tracrRNA region; and/or a tracrRNA extension comprising 10-5000 nucleotides in length, or any combination thereof.

[0367] In some instances, a kit can comprise a site-directed polypeptide (and/or a nucleic acid encoding the same), wherein the site-directed polypeptide can comprise an amino acid sequence comprising at least 15% amino acid identity to a Cas9 from S. pyogenes and, two nucleic acid cleaving domains (i.e., an HNH domain and a RuvC domain); and, a nucleic acid-targeting nucleic acid (and/or a nucleic acid encoding the same) comprising a spacer extension sequence from 10-5000 nucleotides in length; a spacer sequence of 12-30 nucleotides in length, wherein the spacer is at least 50% complementary to a target nucleic acid; a minimum CRISPR repeat comprising at least 60% identity to a crRNA from a prokaryote (e.g., S. pyogenes) or phage over 6, 7, or 8 contiguous nucleotides and wherein the minimum CRISPR repeat has a length from 5-30 nucleotides; a minimum tracrRNA sequence comprising at least 60% identity to a tracrRNA from a bacterium (e.g., S. pyogenes) over 6, 7, or 8 contiguous nucleotides and wherein the minimum tracrRNA sequence has a length from 5-30 nucleotides; a linker sequence that links the minimum CRISPR repeat and the minimum tracrRNA and comprises a length from 3-5000 nucleotides; a 3′ tracrRNA that comprises at least 60% identity to a tracrRNA from a prokaryote (e.g., S. pyogenes) or phage over 6, 7, or 8 contiguous nucleotides and wherein the 3′ tracrRNA comprises a length from 10-20 nucleotides, and comprises a duplexed region; and/or a tracrRNA extension comprising 10-5000 nucleotides in length, or any combination thereof. This nucleic acid-targeting nucleic acid can be referred to as a single guide nucleic acid-targeting nucleic acid.

[0368] In some instances, a kit can comprise a site-directed polypeptide (and/or a nucleic acid encoding the same), wherein the site-directed polypeptide can comprise an amino acid sequence comprising at least 15% amino acid identity to a Cas9 from S. pyogenes, and two nucleic acid cleaving domains (i.e., an HNH domain and a RuvC domain); and, a nucleic acid-targeting nucleic acid (and/or a nucleic acid encoding the same) can comprising a spacer extension sequence from 10-5000 nucleotides in length; a spacer sequence of 12-30 nucleotides in length, wherein the spacer is at least 50% complementary to a target nucleic acid; a duplex comprising 1) a minimum CRISPR repeat comprising at least 60% identity to a crRNA from a prokaryote (e.g., S. pyogenes) or phage over 6 contiguous nucleotides and wherein the minimum CRISPR repeat has a length from 5-30 nucleotides, 2) a minimum tracrRNA sequence comprising at least 60% identity to a tracrRNA from a bacterium (e.g., S. pyogenes) over 6 contiguous nucleotides and wherein the minimum tracrRNA sequence has a length from 5-30 nucleotides, and 3) a bulge wherein the bulge comprises at least 3 unpaired nucleotides on the minimum CRISPR repeat strand of the duplex and at least 1 unpaired nucleotide on the minimum tracrRNA sequence strand of the duplex; a linker sequence that links the minimum CRISPR repeat and the minimum tracrRNA and comprises a length from 3-5000 nucleotides; a 3′ tracrRNA that comprises at least 60% identity to a tracrRNA from a prokaryote (e.g., S. pyogenes) or phage over 6 contiguous nucleotides, wherein the 3′ tracrRNA comprises a length from 10-20 nucleotides and comprises a duplexed region; a P-domain that starts from 1-5 nucleotides downstream of the duplex comprising the minimum CRISPR repeat and the minimum tracrRNA, comprises 1-10 nucleotides, comprises a sequence that can hybridize to a protospacer adjacent motif in a target nucleic acid, can form a hairpin, and is located in the 3′ tracrRNA region; and/or a tracrRNA extension comprising 10-5000 nucleotides in length, or any combination thereof.

[0369] In some instances, a kit can comprise a site-directed polypeptide (and/or a nucleic acid encoding the same), wherein the site-directed polypeptide comprises an amino acid sequence comprising at least 15% amino acid identity to a Cas9 from S. pyogenes, two nucleic acid cleaving domains (i.e., an HNH domain and a RuvC domain), and a linker linking the site-directed polypeptide to a non-native sequence; and a double-guide nucleic acid-targeting nucleic acid (and/or a nucleic acid encoding the same) comprising 1) a first nucleic acid molecule comprising a spacer extension sequence from 10-5000 nucleotides in length; a spacer sequence of 12-30 nucleotides in length, wherein the spacer is at least 50% complementary to a target nucleic acid; and a minimum CRISPR repeat comprising at least 60% identity to a crRNA from a prokaryote (e.g., S. pyogenes) or phage over 6 contiguous nucleotides and wherein the minimum CRISPR repeat has a length from 5-30 nucleotides; and 2) a second nucleic acid molecule of the double-guide nucleic acid-targeting nucleic acid can comprise a minimum tracrRNA sequence comprising at least 60% identity to a tracrRNA from a prokaryote (e.g., S. pyogenes) or phage over 6 contiguous nucleotides and wherein the minimum tracrRNA sequence has a length from 5-30 nucleotides; a 3′ tracrRNA that comprises at least 60% identity to a tracrRNA from a bacterium (e.g., S. pyogenes) over 6 contiguous nucleotides and wherein the 3′ tracrRNA comprises a length from 10-20 nucleotides, and comprises a duplexed region; and/or a tracrRNA extension comprising 10-5000 nucleotides in length, or any combination thereof.

[0370] In some instances, a kit can comprise a site-directed polypeptide (and/or a nucleic acid encoding the same), wherein the site-directed polypeptide comprises an amino acid sequence comprising at least 15% amino acid identity to a Cas9 from S. pyogenes, two nucleic acid cleaving domains (i.e., an HNH domain and a RuvC domain), and a linker linking the site-directed polypeptide to a non-native sequence; and a double-guide nucleic acid-targeting nucleic acid (and/or a nucleic acid encoding the same) comprising 1) a first nucleic acid molecule comprising a spacer extension sequence from 10-5000 nucleotides in length; a spacer sequence of 12-30 nucleotides in length, wherein the spacer is at least 50% complementary to a target nucleic acid; a minimum CRISPR repeat comprising at least 60% identity to a crRNA from a prokaryote (e.g., S. pyogenes) or phage over 6 contiguous nucleotides and wherein the minimum CRISPR repeat has a length from 5-30 nucleotides, and at least 3 unpaired nucleotides of a bulge; and 2) a second nucleic acid molecule of the double-guide nucleic acid-targeting nucleic acid can comprise a minimum tracrRNA sequence comprising at least 60% identity to a tracrRNA from a prokaryote (e.g., S. pyogenes) or phage over 6 contiguous nucleotides and wherein the minimum tracrRNA sequence has a length from 5-30 nucleotides and at least 1 unpaired nucleotide of a bulge, wherein the unpaired nucleotide of the bulge is located in the same bulge as the 3 unpaired nucleotides of the minimum CRISPR repeat; a 3′ tracrRNA that comprises at least 60% identity to a tracrRNA from a prokaryote (e.g., S. pyogenes) or phage over 6 contiguous nucleotides and wherein the 3′ tracrRNA comprises a length from 10-20 nucleotides, and comprises a duplexed region; a P-domain that starts from 1-5 nucleotides downstream of the duplex comprising the minimum CRISPR repeat and the minimum tracrRNA, comprises 1-10 nucleotides, comprises a sequence that can hybridize to a protospacer adjacent motif in a target nucleic acid, can form a hairpin, and is located in the 3′ tracrRNA region; and/or a tracrRNA extension comprising 10-5000 nucleotides in length, or any combination thereof.

[0371] In some instances, a kit can comprise a site-directed polypeptide (and/or a nucleic acid encoding the same), wherein the site-directed polypeptide comprises an amino acid sequence comprising at least 15% amino acid identity to a Cas9 from S. pyogenes, two nucleic acid cleaving domains (i.e., an HNH domain and a RuvC domain), and a linker linking the site-directed polypeptide to a non-native sequence; and a nucleic acid-targeting nucleic acid (and/or a nucleic acid encoding the same) comprising a spacer extension sequence from 10-5000 nucleotides in length; a spacer sequence of 12-30 nucleotides in length, wherein the spacer is at least 50% complementary to a target nucleic acid; a minimum CRISPR repeat comprising at least 60% identity to a crRNA from a prokaryote (e.g., S. pyogenes) or phage over 6, 7, or 8 contiguous nucleotides and wherein the minimum CRISPR repeat has a length from 5-30 nucleotides; a minimum tracrRNA sequence comprising at least 60% identity to a tracrRNA from a bacterium (e.g., S. pyogenes) over 6, 7, or 8 contiguous nucleotides and wherein the minimum tracrRNA sequence has a length from 5-30 nucleotides; a linker sequence that links the minimum CRISPR repeat and the minimum tracrRNA and comprises a length from 3-5000 nucleotides; a 3′ tracrRNA that comprises at least 60% identity to a tracrRNA from a prokaryote (e.g., S. pyogenes) or phage over 6, 7, or 8 contiguous nucleotides and wherein the 3′ tracrRNA comprises a length from 10-20 nucleotides, and comprises a duplexed region; and/or a tracrRNA extension comprising 10-5000 nucleotides in length, or any combination thereof. This nucleic acid-targeting nucleic acid can be referred to as a single guide nucleic acid-targeting nucleic acid.

[0372] In some instances, a kit can comprise a site-directed polypeptide (and/or a nucleic acid encoding the same), wherein the site-directed polypeptide comprises an amino acid sequence comprising at least 15% amino acid identity to a Cas9 from S. pyogenes, two nucleic acid cleaving domains (i.e., an HNH domain and a RuvC domain), and a linker linking the site-directed polypeptide to a non-native sequence; and nucleic acid-targeting nucleic acid (and/or a nucleic acid encoding the same) comprising a spacer extension sequence from 10-5000 nucleotides in length; a spacer sequence of 12-30 nucleotides in length, wherein the spacer is at least 50% complementary to a target nucleic acid; a duplex comprising 1) a minimum CRISPR repeat comprising at least 60% identity to a crRNA from a prokaryote (e.g., S. pyogenes) or phage over 6 contiguous nucleotides and wherein the minimum CRISPR repeat has a length from 5-30 nucleotides, 2) a minimum tracrRNA sequence comprising at least 60% identity to a tracrRNA from a bacterium (e.g., S. pyogenes) over 6 contiguous nucleotides and wherein the minimum tracrRNA sequence has a length from 5-30 nucleotides, and 3) a bulge wherein the bulge comprises at least 3 unpaired nucleotides on the minimum CRISPR repeat strand of the duplex and at least 1 unpaired nucleotide on the minimum tracrRNA sequence strand of the duplex; a linker sequence that links the minimum CRISPR repeat and the minimum tracrRNA and comprises a length from 3-5000 nucleotides; a 3′ tracrRNA that comprises at least 60% identity to a tracrRNA from a prokaryote (e.g., S. pyogenes) or phage over 6 contiguous nucleotides, wherein the 3′ tracrRNA comprises a length from 10-20 nucleotides and comprises a duplexed region; a P-domain that starts from 1-5 nucleotides downstream of the duplex comprising the minimum CRISPR repeat and the minimum tracrRNA, comprises 1-10 nucleotides, comprises a sequence that can hybridize to a protospacer adjacent motif in a target nucleic acid, can form a hairpin, and is located in the 3′ tracrRNA region; and/or a tracrRNA extension comprising 10-5000 nucleotides in length, or any combination thereof.

[0373] In some instances, a kit can comprise a site-directed polypeptide (and/or a nucleic acid encoding the same), wherein the site-directed polypeptide comprises at least 15% amino acid identity to a Cas9 from S. pyogenes, two nucleic acid cleaving domains (i.e., an HNH domain and a RuvC domain), wherein the site-directed polypeptide comprises a mutation in one or both of the nucleic acid cleaving domains that reduces the cleaving activity of the nuclease domains by at least 50%; and a double-guide nucleic acid-targeting nucleic acid (and/or a nucleic acid encoding the same) comprising 1) a first nucleic acid molecule comprising a spacer extension sequence from 10-5000 nucleotides in length; a spacer sequence of 12-30 nucleotides in length, wherein the spacer is at least 50% complementary to a target nucleic acid; and a minimum CRISPR repeat comprising at least 60% identity to a crRNA from a prokaryote (e.g., S. pyogenes) or phage over 6 contiguous nucleotides and wherein the minimum CRISPR repeat has a length from 5-30 nucleotides; and 2) a second nucleic acid molecule of the double-guide nucleic acid-targeting nucleic acid can comprise a minimum tracrRNA sequence comprising at least 60% identity to a tracrRNA from a prokaryote (e.g., S. pyogenes) or phage over 6 contiguous nucleotides and wherein the minimum tracrRNA sequence has a length from 5-30 nucleotides; a 3′ tracrRNA that comprises at least 60% identity to a tracrRNA from a bacterium (e.g., S. pyogenes) over 6 contiguous nucleotides and wherein the 3′ tracrRNA comprises a length from 10-20 nucleotides, and comprises a duplexed region; and/or a tracrRNA extension comprising 10-5000 nucleotides in length, or any combination thereof.

[0374] In some instances, a kit can comprise a site-directed polypeptide (and/or a nucleic acid encoding the same), wherein the site-directed polypeptide comprises at least 15% amino acid identity to a Cas9 from S. pyogenes, two nucleic acid cleaving domains (i.e., an HNH domain and a RuvC domain), wherein the site-directed polypeptide comprises a mutation in one or both of the nucleic acid cleaving domains that reduces the cleaving activity of the nuclease domains by at least 50%; and a double-guide nucleic acid-targeting nucleic acid (and/or a nucleic acid encoding the same) comprising 1) a first nucleic acid molecule comprising a spacer extension sequence from 10-5000 nucleotides in length; a spacer sequence of 12-30 nucleotides in length, wherein the spacer is at least 50% complementary to a target nucleic acid; a minimum CRISPR repeat comprising at least 60% identity to a crRNA from a prokaryote (e.g., S. pyogenes) or phage over 6 contiguous nucleotides and wherein the minimum CRISPR repeat has a length from 5-30 nucleotides, and at least 3 unpaired nucleotides of a bulge; and 2) a second nucleic acid molecule of the double-guide nucleic acid-targeting nucleic acid can comprise a minimum tracrRNA sequence comprising at least 60% identity to a tracrRNA from a prokaryote (e.g., S. pyogenes) or phage over 6 contiguous nucleotides and wherein the minimum tracrRNA sequence has a length from 5-30 nucleotides and at least 1 unpaired nucleotide of a bulge, wherein the lunpaired nucleotide of the bulge is located in the same bulge as the 3 unpaired nucleotides of the minimum CRISPR repeat; a 3′ tracrRNA that comprises at least 60% identity to a tracrRNA from a prokaryote (e.g., S. pyogenes) or phage over 6 contiguous nucleotides and wherein the 3′ tracrRNA comprises a length from 10-20 nucleotides, and comprises a duplexed region; a P-domain that starts from 1-5 nucleotides downstream of the duplex comprising the minimum CRISPR repeat and the minimum tracrRNA, comprises 1-10 nucleotides, comprises a sequence that can hybridize to a protospacer adjacent motif in a target nucleic acid, can form a hairpin, and is located in the 3′ tracrRNA region; and/or a tracrRNA extension comprising 10-5000 nucleotides in length, or any combination thereof.

[0375] In some instances, a kit can comprise a site-directed polypeptide (and/or a nucleic acid encoding the same), wherein the site-directed polypeptide comprises at least 15% amino acid identity to a Cas9 from S. pyogenes, two nucleic acid cleaving domains (i.e., an HNH domain and a RuvC domain), wherein the site-directed polypeptide comprises a mutation in one or both of the nucleic acid cleaving domains that reduces the cleaving activity of the nuclease domains by at least 50%; and nucleic acid-targeting nucleic acid (and/or a nucleic acid encoding the same) comprising a spacer extension sequence from 10-5000 nucleotides in length; a spacer sequence of 12-30 nucleotides in length, wherein the spacer is at least 50% complementary to a target nucleic acid; a minimum CRISPR repeat comprising at least 60% identity to a crRNA from a prokaryote (e.g., S. pyogenes) or phage over 6, 7, or 8 contiguous nucleotides and wherein the minimum CRISPR repeat has a length from 5-30 nucleotides; a minimum tracrRNA sequence comprising at least 60% identity to a tracrRNA from a bacterium (e.g., S. pyogenes) over 6, 7, or 8 contiguous nucleotides and wherein the minimum tracrRNA sequence has a length from 5-30 nucleotides; a linker sequence that links the minimum CRISPR repeat and the minimum tracrRNA and comprises a length from 3-5000 nucleotides; a 3′ tracrRNA that comprises at least 60% identity to a tracrRNA from a prokaryote (e.g., S. pyogenes) or phage over 6, 7, or 8 contiguous nucleotides and wherein the 3′ tracrRNA comprises a length from 10-20 nucleotides, and comprises a duplexed region; and/or a tracrRNA extension comprising 10-5000 nucleotides in length, or any combination thereof. This nucleic acid-targeting nucleic acid can be referred to as a single guide nucleic acid-targeting nucleic acid.

[0376] In some instances, a kit can comprise a site-directed polypeptide (and/or a nucleic acid encoding the same), wherein the site-directed polypeptide comprises at least 15% amino acid identity to a Cas9 from S. pyogenes, two nucleic acid cleaving domains (i.e., an HNH domain and a RuvC domain), wherein the site-directed polypeptide comprises a mutation in one or both of the nucleic acid cleaving domains that reduces the cleaving activity of the nuclease domains by at least 50%; and nucleic acid-targeting nucleic acid (and/or a nucleic acid encoding the same) comprising a spacer extension sequence from 10-5000 nucleotides in length; a spacer sequence of 12-30 nucleotides in length, wherein the spacer is at least 50% complementary to a target nucleic acid; a duplex comprising 1) a minimum CRISPR repeat comprising at least 60% identity to a crRNA from a prokaryote (e.g., S. pyogenes) or phage over 6 contiguous nucleotides and wherein the minimum CRISPR repeat has a length from 5-30 nucleotides, 2) a minimum tracrRNA sequence comprising at least 60% identity to a tracrRNA from a bacterium (e.g., S. pyogenes) over 6 contiguous nucleotides and wherein the minimum tracrRNA sequence has a length from 5-30 nucleotides, and 3) a bulge wherein the bulge comprises at least 3 unpaired nucleotides on the minimum CRISPR repeat strand of the duplex and at least 1 unpaired nucleotide on the minimum tracrRNA sequence strand of the duplex; a linker sequence that links the minimum CRISPR repeat and the minimum tracrRNA and comprises a length from 3-5000 nucleotides; a 3′ tracrRNA that comprises at least 60% identity to a tracrRNA from a prokaryote (e.g., S. pyogenes) or phage over 6 contiguous nucleotides, wherein the 3′ tracrRNA comprises a length from 10-20 nucleotides and comprises a duplexed region; a P-domain that starts from 1-5 nucleotides downstream of the duplex comprising the minimum CRISPR repeat and the minimum tracrRNA, comprises 1-10 nucleotides, comprises a sequence that can hybridize to a protospacer adjacent motif in a target nucleic acid, can form a hairpin, and is located in the 3′ tracrRNA region; and/or a tracrRNA extension comprising 10-5000 nucleotides in length, or any combination thereof.

[0377] In some instances, a kit can comprise a site-directed polypeptide (and/or a nucleic acid encoding the same), wherein the site-directed polypeptide comprises at least 15% amino acid identity to a Cas9 from S. pyogenes, two nucleic acid cleaving domains (i.e., an HNH domain and a RuvC domain), wherein the site-directed polypeptide comprises a mutation in one or both of the nucleic acid cleaving domains that reduces the cleaving activity of the nuclease domains by at least 50%; and a double-guide nucleic acid-targeting nucleic acid (and/or a nucleic acid encoding the same) comprising 1) a first nucleic acid molecule comprising a spacer extension sequence from 10-5000 nucleotides in length; a spacer sequence of 12-30 nucleotides in length, wherein the spacer is at least 50% complementary to a target nucleic acid; and a minimum CRISPR repeat comprising at least 60% identity to a crRNA from a prokaryote (e.g., S. pyogenes) or phage over 6 contiguous nucleotides and wherein the minimum CRISPR repeat has a length from 5-30 nucleotides; and 2) a second nucleic acid molecule of the double-guide nucleic acid-targeting nucleic acid can comprise a minimum tracrRNA sequence comprising at least 60% identity to a tracrRNA from a prokaryote (e.g., S. pyogenes) or phage over 6 contiguous nucleotides and wherein the minimum tracrRNA sequence has a length from 5-30 nucleotides; a 3′ tracrRNA that comprises at least 60% identity to a tracrRNA from a bacterium (e.g., S. pyogenes) over 6 contiguous nucleotides and wherein the 3′ tracrRNA comprises a length from 10-20 nucleotides, and comprises a duplexed region; and/or a tracrRNA extension comprising 10-5000 nucleotides in length, or any combination thereof.

[0378] In some instances, a kit can comprise a site-directed polypeptide (and/or a nucleic acid encoding the same), wherein the site-directed polypeptide comprises at least 15% amino acid identity to a Cas9 from S. pyogenes, two nucleic acid cleaving domains (i.e., an HNH domain and a RuvC domain), wherein the site-directed polypeptide comprises a mutation in one or both of the nucleic acid cleaving domains that reduces the cleaving activity of the nuclease domains by at least 50%; and a double-guide nucleic acid-targeting nucleic acid (and/or a nucleic acid encoding the same) comprising 1) a first nucleic acid molecule comprising a spacer extension sequence from 10-5000 nucleotides in length; a spacer sequence of 12-30 nucleotides in length, wherein the spacer is at least 50% complementary to a target nucleic acid; a minimum CRISPR repeat comprising at least 60% identity to a crRNA from a prokaryote (e.g., S. pyogenes) or phage over 6 contiguous nucleotides and wherein the minimum CRISPR repeat has a length from 5-30 nucleotides, and at least 3 unpaired nucleotides of a bulge; and 2) a second nucleic acid molecule of the double-guide nucleic acid-targeting nucleic acid can comprise a minimum tracrRNA sequence comprising at least 60% identity to a tracrRNA from a prokaryote (e.g., S. pyogenes) or phage over 6 contiguous nucleotides and wherein the minimum tracrRNA sequence has a length from 5-30 nucleotides and at least 1 unpaired nucleotide of a bulge, wherein the lunpaired nucleotide of the bulge is located in the same bulge as the 3 unpaired nucleotides of the minimum CRISPR repeat; a 3′ tracrRNA that comprises at least 60% identity to a tracrRNA from a prokaryote (e.g., S. pyogenes) or phage over 6 contiguous nucleotides and wherein the 3′ tracrRNA comprises a length from 10-20 nucleotides, and comprises a duplexed region; a P-domain that starts from 1-5 nucleotides downstream of the duplex comprising the minimum CRISPR repeat and the minimum tracrRNA, comprises 1-10 nucleotides, comprises a sequence that can hybridize to a protospacer adjacent motif in a target nucleic acid, can form a hairpin, and is located in the 3′ tracrRNA region; and/or a tracrRNA extension comprising 10-5000 nucleotides in length, or any combination thereof.

[0379] In some instances, a kit can comprise a site-directed polypeptide (and/or a nucleic acid encoding the same), wherein the site-directed polypeptide comprises at least 15% amino acid identity to a Cas9 from S. pyogenes, two nucleic acid cleaving domains (i.e., an HNH domain and a RuvC domain), wherein the site-directed polypeptide comprises a mutation in one or both of the nucleic acid cleaving domains that reduces the cleaving activity of the nuclease domains by at least 50%; and nucleic acid-targeting nucleic acid (and/or a nucleic acid encoding the same) comprising a spacer extension sequence from 10-5000 nucleotides in length; a spacer sequence of 12-30 nucleotides in length, wherein the spacer is at least 50% complementary to a target nucleic acid; a minimum CRISPR repeat comprising at least 60% identity to a crRNA from a prokaryote (e.g., S. pyogenes) or phage over 6, 7, or 8 contiguous nucleotides and wherein the minimum CRISPR repeat has a length from 5-30 nucleotides; a minimum tracrRNA sequence comprising at least 60% identity to a tracrRNA from a bacterium (e.g., S. pyogenes) over 6, 7, or 8 contiguous nucleotides and wherein the minimum tracrRNA sequence has a length from 5-30 nucleotides; a linker sequence that links the minimum CRISPR repeat and the minimum tracrRNA and comprises a length from 3-5000 nucleotides; a 3′ tracrRNA that comprises at least 60% identity to a tracrRNA from a prokaryote (e.g., S. pyogenes) or phage over 6, 7, or 8 contiguous nucleotides and wherein the 3′ tracrRNA comprises a length from 10-20 nucleotides, and comprises a duplexed region; and/or a tracrRNA extension comprising 10-5000 nucleotides in length, or any combination thereof. This nucleic acid-targeting nucleic acid can be referred to as a single guide nucleic acid-targeting nucleic acid.

[0380] In some instances, a kit can comprise a site-directed polypeptide (and/or a nucleic acid encoding the same), wherein the site-directed polypeptide comprises at least 15% amino acid identity to a Cas9 from S. pyogenes, two nucleic acid cleaving domains (i.e., an HNH domain and a RuvC domain), wherein the site-directed polypeptide comprises a mutation in one or both of the nucleic acid cleaving domains that reduces the cleaving activity of the nuclease domains by at least 50%; and a nucleic acid-targeting nucleic acid (and/or a nucleic acid encoding the same) comprising a spacer extension sequence from 10-5000 nucleotides in length; a spacer sequence of 12-30 nucleotides in length, wherein the spacer is at least 50% complementary to a target nucleic acid; a duplex comprising 1) a minimum CRISPR repeat comprising at least 60% identity to a crRNA from a prokaryote (e.g., S. pyogenes) or phage over 6 contiguous nucleotides and wherein the minimum CRISPR repeat has a length from 5-30 nucleotides, 2) a minimum tracrRNA sequence comprising at least 60% identity to a tracrRNA from a bacterium (e.g., S. pyogenes) over 6 contiguous nucleotides and wherein the minimum tracrRNA sequence has a length from 5-30 nucleotides, and 3) a bulge wherein the bulge comprises at least 3 unpaired nucleotides on the minimum CRISPR repeat strand of the duplex and at least 1 unpaired nucleotide on the minimum tracrRNA sequence strand of the duplex; a linker sequence that links the minimum CRISPR repeat and the minimum tracrRNA and comprises a length from 3-5000 nucleotides; a 3′ tracrRNA that comprises at least 60% identity to a tracrRNA from a prokaryote (e.g., S. pyogenes) or phage over 6 contiguous nucleotides, wherein the 3′ tracrRNA comprises a length from 10-20 nucleotides and comprises a duplexed region; a P-domain that starts from 1-5 nucleotides downstream of the duplex comprising the minimum CRISPR repeat and the minimum tracrRNA, comprises 1-10 nucleotides, comprises a sequence that can hybridize to a protospacer adjacent motif in a target nucleic acid, can form a hairpin, and is located in the 3′ tracrRNA region; and/or a tracrRNA extension comprising 10-5000 nucleotides in length, or any combination thereof.

[0381] In some instances, a kit can comprise a site-directed polypeptide (and/or a nucleic acid encoding the same), wherein the site-directed polypeptide comprises at least 15% amino acid identity to a Cas9 from S. pyogenes, two nucleic acid cleaving domains (i.e., an HNH domain and a RuvC domain), wherein the site-directed polypeptide comprises a mutation in one or both of the nucleic acid cleaving domains that reduces the cleaving activity of the nuclease domains by at least 50%; and a double-guide nucleic acid-targeting nucleic acid (and/or a nucleic acid encoding the same) comprising 1) a first nucleic acid molecule comprising a spacer extension sequence from 10-5000 nucleotides in length; a spacer sequence of 12-30 nucleotides in length, wherein the spacer is at least 50% complementary to a target nucleic acid; and a minimum CRISPR repeat comprising at least 60% identity to a crRNA from a prokaryote (e.g., S. pyogenes) or phage over 6 contiguous nucleotides and wherein the minimum CRISPR repeat has a length from 5-30 nucleotides; and 2) a second nucleic acid molecule of the double-guide nucleic acid-targeting nucleic acid can comprise a minimum tracrRNA sequence comprising at least 60% identity to a tracrRNA from a prokaryote (e.g., S. pyogenes) or phage over 6 contiguous nucleotides and wherein the minimum tracrRNA sequence has a length from 5-30 nucleotides; a 3′ tracrRNA that comprises at least 60% identity to a tracrRNA from a bacterium (e.g., S. pyogenes) over 6 contiguous nucleotides and wherein the 3′ tracrRNA comprises a length from 10-20 nucleotides, and comprises a duplexed region; and/or a tracrRNA extension comprising 10-5000 nucleotides in length, or any combination thereof.

[0382] In some instances, a kit can comprise a site-directed polypeptide (and/or a nucleic acid encoding the same), wherein the site-directed polypeptide comprises at least 15% amino acid identity to a Cas9 from S. pyogenes, and two nucleic acid cleaving domains, wherein one or both of the nucleic acid cleaving domains comprise at least 50% amino acid identity to a nuclease domain from Cas9 from S. pyogenes; and a double-guide nucleic acid-targeting nucleic acid (and/or a nucleic acid encoding the same) comprising: 1) a first nucleic acid molecule comprising a spacer extension sequence from 10-5000 nucleotides in length; a spacer sequence of 12-30 nucleotides in length, wherein the spacer is at least 50% complementary to a target nucleic acid; a minimum CRISPR repeat comprising at least 60% identity to a crRNA from a prokaryote (e.g., S. pyogenes) or phage over 6 contiguous nucleotides and wherein the minimum CRISPR repeat has a length from 5-30 nucleotides, and at least 3 unpaired nucleotides of a bulge; and 2) a second nucleic acid molecule of the double-guide nucleic acid-targeting nucleic acid can comprise a minimum tracrRNA sequence comprising at least 60% identity to a tracrRNA from a prokaryote (e.g., S. pyogenes) or phage over 6 contiguous nucleotides and wherein the minimum tracrRNA sequence has a length from 5-30 nucleotides and at least 1 unpaired nucleotide of a bulge, wherein the 1 unpaired nucleotide of the bulge is located in the same bulge as the 3 unpaired nucleotides of the minimum CRISPR repeat; a 3′ tracrRNA that comprises at least 60% identity to a tracrRNA from a prokaryote (e.g., S. pyogenes) or phage over 6 contiguous nucleotides and wherein the 3′ tracrRNA comprises a length from 10-20 nucleotides, and comprises a duplexed region; a P-domain that starts from 1-5 nucleotides downstream of the duplex comprising the minimum CRISPR repeat and the minimum tracrRNA, comprises 1-10 nucleotides, comprises a sequence that can hybridize to a protospacer adjacent motif in a target nucleic acid, can form a hairpin, and is located in the 3′ tracrRNA region; and/or a tracrRNA extension comprising 10-5000 nucleotides in length, or any combination thereof.

[0383] In some instances, a kit can comprise a site-directed polypeptide (and/or a nucleic acid encoding the same), wherein the site-directed polypeptide comprises at least 15% amino acid identity to a Cas9 from S. pyogenes, and two nucleic acid cleaving domains, wherein one or both of the nucleic acid cleaving domains comprise at least 50% amino acid identity to a nuclease domain from Cas9 from S. pyogenes; and nucleic acid-targeting nucleic acid (and/or a nucleic acid encoding the same) comprising a spacer extension sequence from 10-5000 nucleotides in length; a spacer sequence of 12-30 nucleotides in length, wherein the spacer is at least 50% complementary to a target nucleic acid; a minimum CRISPR repeat comprising at least 60% identity to a crRNA from a prokaryote (e.g., S. pyogenes) or phage over 6, 7, or 8 contiguous nucleotides and wherein the minimum CRISPR repeat has a length from 5-30 nucleotides; a minimum tracrRNA sequence comprising at least 60% identity to a tracrRNA from a bacterium (e.g., S. pyogenes) over 6, 7, or 8 contiguous nucleotides and wherein the minimum tracrRNA sequence has a length from 5-30 nucleotides; a linker sequence that links the minimum CRISPR repeat and the minimum tracrRNA and comprises a length from 3-5000 nucleotides; a 3′ tracrRNA that comprises at least 60% identity to a tracrRNA from a prokaryote (e.g., S. pyogenes) or phage over 6, 7, or 8 contiguous nucleotides and wherein the 3′ tracrRNA comprises a length from 10-20 nucleotides, and comprises a duplexed region; and/or a tracrRNA extension comprising 10-5000 nucleotides in length, or any combination thereof. This nucleic acid-targeting nucleic acid can be referred to as a single guide nucleic acid-targeting nucleic acid.

[0384] In some instances, a kit can comprise a site-directed polypeptide (and/or a nucleic acid encoding the same), wherein the site-directed polypeptide comprises at least 15% amino acid identity to a Cas9 from S. pyogenes, and two nucleic acid cleaving domains, wherein one or both of the nucleic acid cleaving domains comprise at least 50% amino acid identity to a nuclease domain from Cas9 from S. pyogenes; and a nucleic acid-targeting nucleic acid (and/or a nucleic acid encoding the same) comprising a spacer extension sequence from 10-5000 nucleotides in length; a spacer sequence of 12-30 nucleotides in length, wherein the spacer is at least 50% complementary to a target nucleic acid; a duplex comprising: 1) a minimum CRISPR repeat comprising at least 60% identity to a crRNA from a prokaryote (e.g., S. pyogenes) or phage over 6 contiguous nucleotides and wherein the minimum CRISPR repeat has a length from 5-30 nucleotides, 2) a minimum tracrRNA sequence comprising at least 60% identity to a tracrRNA from a bacterium (e.g., S. pyogenes) over 6 contiguous nucleotides and wherein the minimum tracrRNA sequence has a length from 5-30 nucleotides, and 3) a bulge wherein the bulge comprises at least 3 unpaired nucleotides on the minimum CRISPR repeat strand of the duplex and at least 1 unpaired nucleotide on the minimum tracrRNA sequence strand of the duplex; a linker sequence that links the minimum CRISPR repeat and the minimum tracrRNA and comprises a length from 3-5000 nucleotides; a 3′ tracrRNA that comprises at least 60% identity to a tracrRNA from a prokaryote (e.g., S. pyogenes) or phage over 6 contiguous nucleotides, wherein the 3′ tracrRNA comprises a length from 10-20 nucleotides and comprises a duplexed region; a P-domain that starts from 1-5 nucleotides downstream of the duplex comprising the minimum CRISPR repeat and the minimum tracrRNA, comprises 1-10 nucleotides, comprises a sequence that can hybridize to a protospacer adjacent motif in a target nucleic acid, can form a hairpin, and is located in the 3′ tracrRNA region; and/or a tracrRNA extension comprising 10-5000 nucleotides in length, or any combination thereof.

[0385] In some embodiments of any of the above kits, the kit can comprise a single guide nucleic acid-targeting nucleic acid. In some embodiments of any of the above kits, the kit can comprise a double guide nucleic acid-targeting nucleic acid. In some embodiments of any of the above kits, the kit can comprise two or more double guide or single guide nucleic acid-targeting nucleic acids. In some embodiments, a vector may encode for a nucleic acid targeting nucleic acid.

[0386] In some embodiments of any of the above kits, the kit can further comprise a donor polynucleotide, or a polynucleotide sequence encoding the donor polynucleotide, to effect the desired genetic modification. Components of a kit can be in separate containers; or can be combined in a single container.

[0387] A kit described above further comprise one or more additional reagents, where such additional reagents can be selected from: a buffer, a buffer for introducing the a polypeptide or polynucleotide item of the kit into a cell, a wash buffer, a control reagent, a control vector, a control RNA polynucleotide, a reagent for in vitro production of the polypeptide from DNA, adaptors for sequencing and the like. A buffer can be a stabilization buffer, a reconstituting buffer, or a diluting buffer.

[0388] In some instances, a kit can comprise one or more additional reagents specific for plants and/or fungi. One or more additional reagents for plants and/or fungi can include, for example, soil, nutrients, plants, seeds, spores, Agrobacterium, T-DNA vector, and a pBINAR vector.

[0389] In addition to above-mentioned components, a kit can further include instructions for using the components of the kit to practice the methods. The instructions for practicing the methods are generally recorded on a suitable recording medium. For example, the instructions may be printed on a substrate, such as paper or plastic, etc. The instructions may be present in the kits as a package insert, in the labeling of the container of the kit or components thereof (i.e., associated with the packaging or subpackaging) etc. The instructions can be present as an electronic storage data file present on a suitable computer readable storage medium, e.g. CD-ROM, diskette, flash drive, etc. In some instances, the actual instructions are not present in the kit, but means for obtaining the instructions from a remote source (e.g. via the Internet), can be provided. An example of this embodiment is a kit that includes a web address where the instructions can be viewed and/or from which the instructions can be downloaded. As with the instructions, this means for obtaining the instructions can be recorded on a suitable substrate.

[0390] In some embodiments, a kit can comprise a linearized vector. A linearized vector can comprise a plasmid comprising a site-directed polypeptide and/or a nucleic acid-targeting nucleic acid that is linearized (e.g., it is not circular). A linearized vector can be stored in a buffer comprising 10 mM Tris-HCl, pH 8.0 and 1 mM EDTA, pH 8.0. A kit can comprise about 20 microliters of the linearized CRISPR nuclease vector. In some embodiments, a kit can comprise one or more circular vectors.

[0391] In some embodiments a kit can comprise an oligonucleotide annealing buffer. An oligonucleotide annealing buffer can be a buffer used to anneal DNA oligos together to generate a double-stranded DNA that encode a nucleic acid-targeting nucleic acid. A oligonucleotide annealing buffer can be at least about, 1, 2, 3, 4, 5, 6, 7, 8, 9, or 10 or more concentrated than the concentration of use. An oligonucleotide annealing buffer can be 10 times more concentrated than the concentration when used. An oligonucleotide annealing buffer can comprise 100 mM Tris-HCl, pH 8.0, 10 mM EDTA, pH 8.0 and IM NaCl. A kit can comprise 250 microliters of the oligonucleotide annealing buffer.

[0392] A kit can comprise DNase-free water. A kit can comprise RNAse-free water. A kit can comprise at least 1.5 milliliters of RNase-free and/or DNAse-free water.

[0393] A kit can comprise a ligation buffer. A ligation buffer can be used to ligate oligonucleotides to the linearized CRISPR nuclease vector. A ligation buffer can be at least about, 1, 2, 3, 4, 5, 6, 7, 8, 9, or 10 or more concentrated than the concentration of use. A ligation buffer can be 5 times as concentrated as the concentration of use. A 5×ligation buffer can comprise 250 mM Tris-HCl, pH 7.6, 50 mM MgCl2, 5 mM ATP, 5 mM DTT, and 25% (w/v) polyethylene glycol-8000. A kit can comprise about 80 microliters of a ligation buffer.

[0394] A kit can comprise a DNA ligase. A DNA ligase can be used to ligate the oligonucleotides to the linearized CRISPR nuclease vector. A DNA ligase can comprise 10 mM Tris-HCl, pH 7.5, 50 mM KCl, 1 mM DTT, and 50% (v/v) glycerol. A kit can comprise 20 microliters of a DNA ligase.

[0395] A kit can comprise a sequencing primer. The sequencing primer can be used to sequence the vector once the oligonucleotides have been ligated into a linearized vector. A sequencing primer can be diluted in Tris-EDTA buffer pH 8.0. A kit can comprise 20 microliters of a sequencing primer.

[0396] A kit can comprise a control oligonucleotide. A control oligonucleotide can be an oligonucleotide to be ligated into a linearized vector but does not encode for a nucleic acid-targeting nucleic acid. A control oligonucleotide can be diluted in 1×concentration of the oligonucleotide annealing buffer. A kit can comprise 10 microliters of a control oligonucleotide.

[0397] In some instances, a kit can comprise a linearized vector comprising a site-directed polypeptide and a nucleic acid-targeting nucleic acid, an oligonucleotide annealing buffer, DNAse/RNAse free water, a ligation buffer, a ligase enzyme, a sequencing primer and a control oligonucleotide, or any combination thereof.

### Pharmaceutical Compositions

[0398] Molecules, such as a nucleic acid-targeting nucleic acid of the disclosure as described herein, a polynucleotide encoding a nucleic acid-targeting nucleic acid, a site-directed polypeptide of the disclosure, a polynucleotide encoding a site-directed polypeptide, an effector protein, a polynucleotide encoding an effector protein, a multiplexed genetic targeting agent, a polynucleotide encoding a multiplexed genetic targeting agent, a donor polynucleotide, a tandem fusion protein, a polynucleotide encoding a tandem fusion protein, a reporter element, a genetic element of interest, a component of a split system and/or any nucleic acid or proteinaceous molecule necessary to carry out the embodiments of the methods of the disclosure, can be formulated in a pharmaceutical composition.

[0399] A pharmaceutical composition can comprise a combination of any molecules described herein with other chemical components, such as carriers, stabilizers, diluents, dispersing agents, suspending agents, thickening agents, and/or excipients. The pharmaceutical composition can facilitate administration of the molecule to an organism. Pharmaceutical compositions can be administered in therapeutically-effective amounts as pharmaceutical compositions by various forms and routes including, for example, intravenous, subcutaneous, intramuscular, oral, rectal, aerosol, parenteral, ophthalmic, pulmonary, transdermal, vaginal, otic, nasal, and topical administration.

[0400] A pharmaceutical composition can be administered in a local or systemic manner, for example, via injection of the molecule directly into an organ, optionally in a depot or sustained release formulation. Pharmaceutical compositions can be provided in the form of a rapid release formulation, in the form of an extended release formulation, or in the form of an intermediate release formulation. A rapid release form can provide an immediate release. An extended release formulation can provide a controlled release or a sustained delayed release.

[0401] For oral administration, pharmaceutical compositions can be formulated readily by combining the molecules with pharmaceutically-acceptable carriers or excipients. Such carriers can be used to formulate tablets, powders, pills, dragees, capsules, liquids, gels, syrups, elixirs, slurries, suspensions and the like, for oral ingestion by a subject.

[0402] Pharmaceutical preparations for oral use can be obtained by mixing one or more solid excipient with one or more of the molecules described herein, optionally grinding the resulting mixture, and processing the mixture of granules, after adding suitable auxiliaries, if desired, to obtain tablets or dragee cores. Cores can be provided with suitable coatings. For this purpose, concentrated sugar solutions can be used, which can contain an excipient such as gum arabic, talc, polyvinylpyrrolidone, carbopol gel, polyethylene glycol, and/or titanium dioxide, lacquer solutions, and suitable organic solvents or solvent mixtures. Dyestuffs or pigments can be added to the tablets or dragee coatings, for example, for identification or to characterize different combinations of active compound doses.

[0403] Pharmaceutical preparations which can be used orally can include push-fit capsules made of gelatin, as well as soft, sealed capsules made of gelatin and a plasticizer, such as glycerol or sorbitol. In some embodiments, the capsule comprises a hard gelatin capsule comprising one or more of pharmaceutical, bovine, and plant gelatins. A gelatin can be alkaline-processed. The push-fit capsules can comprise the active ingredients in admixture with filler such as lactose, binders such as starches, and/or lubricants such as talc or magnesium stearate and, stabilizers. In soft capsules, the molecule can be dissolved or suspended in suitable liquids, such as fatty oils, liquid paraffin, or liquid polyethylene glycols. Stabilizers can be added. All formulations for oral administration are provided in dosages suitable for such administration.

[0404] For buccal or sublingual administration, the compositions can be tablets, lozenges, or gels.

[0405] Parental injections can be formulated for bolus injection or continuous infusion. The pharmaceutical compositions can be in a form suitable for parenteral injection as a sterile suspension, solution or emulsion in oily or aqueous vehicles, and can contain formulatory agents such as suspending, stabilizing and/or dispersing agents. Pharmaceutical formulations for parenteral administration can include aqueous solutions of the active compounds in water-soluble form.

[0406] Suspensions of molecules can be prepared as oily injection suspensions. Suitable lipophilic solvents or vehicles include fatty oils such as sesame oil, or synthetic fatty acid esters, such as ethyl oleate or triglycerides, or liposomes. Aqueous injection suspensions can contain substances which increase the viscosity of the suspension, such as sodium carboxymethyl cellulose, sorbitol, or dextran. The suspension can also contain suitable stabilizers or agents which increase the solubility of the molecules to allow for the preparation of highly concentrated solutions. Alternatively, the active ingredient can be in powder form for constitution with a suitable vehicle, e.g., sterile pyrogen-free water, before use.

[0407] The active compounds can be administered topically and can be formulated into a variety of topically administrable compositions, such as solutions, suspensions, lotions, gels, pastes, medicated sticks, balms, creams, and ointments. Such pharmaceutical compositions can comprise solubilizers, stabilizers, tonicity enhancing agents, buffers and preservatives.

[0408] Formulations suitable for transdermal administration of the molecules can employ transdermal delivery devices and transdermal delivery patches, and can be lipophilic emulsions or buffered aqueous solutions, dissolved and/or dispersed in a polymer or an adhesive. Such patches can be constructed for continuous, pulsatile, or on demand delivery of molecules. Transdermal delivery can be accomplished by means of iontophoretic patches and the like. Additionally, transdermal patches can provide controlled delivery. The rate of absorption can be slowed by using rate-controlling membranes or by trapping the compound within a polymer matrix or gel. Conversely, absorption enhancers can be used to increase absorption. An absorption enhancer or carrier can include absorbable pharmaceutically acceptable solvents to assist passage through the skin. For example, transdermal devices can be in the form of a bandage comprising a backing member, a reservoir containing compounds and carriers, a rate controlling barrier to deliver the compounds to the skin of the subject at a controlled and predetermined rate over a prolonged period of time, and adhesives to secure the device to the skin.

[0409] For administration by inhalation, the molecule can be in a form as an aerosol, a mist, or a powder. Pharmaceutical compositions can be delivered in the form of an aerosol spray presentation from pressurized packs or a nebuliser, with the use of a suitable propellant, for example, dichlorodifluoromethane, trichlorofluoromethane, dichlorotetrafluoroethane, carbon dioxide or other suitable gas. In the case of a pressurized aerosol, the dosage unit can be determined by providing a valve to deliver a metered amount. Capsules and cartridges of, for example, gelatin for use in an inhaler or insufflator can be formulated containing a powder mix of the compounds and a suitable powder base such as lactose or starch.

[0410] The molecules can also be formulated in rectal compositions such as enemas, rectal gels, rectal foams, rectal aerosols, suppositories, jelly suppositories, or retention enemas, containing conventional suppository bases such as cocoa butter or other glycerides, as well as synthetic polymers such as polyvinylpyrrolidone and PEG. In suppository forms of the compositions, a low-melting wax such as a mixture of fatty acid glycerides or cocoa butter can be used.

[0411] In practicing the methods of the disclosure, therapeutically-effective amounts of the compounds described herein can be administered in pharmaceutical compositions to a subject having a disease or condition to be treated. A therapeutically-effective amount can vary widely depending on the severity of the disease, the age and relative health of the subject, the potency of the compounds used, and other factors. The compounds can be used singly or in combination with one or more therapeutic agents as components of mixtures.

[0412] Pharmaceutical compositions can be formulated using one or more physiologically-acceptable carriers comprising excipients and auxiliaries, which facilitate processing of the molecule into preparations that can be used pharmaceutically. Formulation can be modified depending upon the route of administration chosen. Pharmaceutical compositions comprising a molecule described herein can be manufactured, for example, by mixing, dissolving, granulating, dragee-making, levigating, emulsifying, encapsulating, entrapping, or compression processes.

[0413] The pharmaceutical compositions can include at least one pharmaceutically acceptable carrier, diluent, or excipient and molecule described herein as free-base or pharmaceutically-acceptable salt form. The methods and pharmaceutical compositions described herein include the use crystalline forms (also known as polymorphs), and active metabolites of these compounds having the same type of activity.

[0414] Methods for the preparation of compositions comprising the compounds described herein can include formulating the molecule with one or more inert, pharmaceutically-acceptable excipients or carriers to form a solid, semi-solid, or liquid composition. Solid compositions can include, for example, powders, tablets, dispersible granules, capsules, cachets, and suppositories. Liquid compositions can include, for example, solutions in which a compound is dissolved, emulsions comprising a compound, or a solution containing liposomes, micelles, or nanoparticles comprising a compound as disclosed herein. Semi-solid compositions can include, for example, gels, suspensions and creams. The compositions can be in liquid solutions or suspensions, solid forms suitable for solution or suspension in a liquid prior to use, or as emulsions. These compositions can also contain minor amounts of nontoxic, auxiliary substances, such as wetting or emulsifying agents, pH buffering agents, and other pharmaceutically-acceptable additives.

[0415] Non-limiting examples of dosage forms can include feed, food, pellet, lozenge, liquid, elixir, aerosol, inhalant, spray, powder, tablet, pill, capsule, gel, geltab, nanosuspension, nanoparticle, microgel, suppository troches, aqueous or oily suspensions, ointment, patch, lotion, dentifrice, emulsion, creams, drops, dispersible powders or granules, emulsion in hard or soft gel capsules, syrups, phytoceuticals, and nutraceuticals, or any combination thereof.

[0416] Non-limiting examples of pharmaceutically-acceptable excipients can include granulating agents, binding agents, lubricating agents, disintegrating agents, sweetening agents, glidants, anti-adherents, anti-static agents, surfactants, anti-oxidants, gums, coating agents, coloring agents, flavouring agents, coating agents, plasticizers, preservatives, suspending agents, emulsifying agents, plant cellulosic material, and spheronization agents, or any combination thereof.

[0417] A composition can be, for example, an immediate release form or a controlled release formulation. An immediate release formulation can be formulated to allow the molecules to act rapidly. Non-limiting examples of immediate release formulations can include readily dissolvable formulations. A controlled release formulation can be a pharmaceutical formulation that has been adapted such that drug release rates and drug release profiles can be matched to physiological and chronotherapeutic requirements or, alternatively, has been formulated to effect release of a drug at a programmed rate. Non-limiting examples of controlled release formulations can include granules, delayed release granules, hydrogels (e.g., of synthetic or natural origin), other gelling agents (e.g., gel-forming dietary fibers), matrix-based formulations (e.g., formulations comprising a polymeric material having at least one active ingredient dispersed through), granules within a matrix, polymeric mixtures, granular masses, and the like.

[0418] A controlled release formulation can be a delayed release form. A delayed release form can be formulated to delay a molecule's action for an extended period of time. A delayed release form can be formulated to delay the release of an effective dose of one or more molecules, for example, for about 4, about 8, about 12, about 16, or about 24 hours.

[0419] A controlled release formulation can be a sustained release form. A sustained release form can be formulated to sustain, for example, the molecule's action over an extended period of time. A sustained release form can be formulated to provide an effective dose of any molecule described herein (e.g., provide a physiologically-effective blood profile) over about 4, about 8, about 12, about 16 or about 24 hours.

### Methods of Administration and Treatment Methods.

[0420] Pharmaceutical compositions containing molecules described herein can be administered for prophylactic and/or therapeutic treatments. In therapeutic applications, the compositions can be administered to a subject already suffering from a disease or condition, in an amount sufficient to cure or at least partially arrest the symptoms of the disease or condition, or to cure, heal, improve, or ameliorate the condition. Amounts effective for this use can vary based on the severity and course of the disease or condition, previous therapy, the subject's health status, weight, and response to the drugs, and the judgment of the treating physician.

[0421] Multiple therapeutic agents can be administered in any order or simultaneously. If simultaneously, the multiple therapeutic agents can be provided in a single, unified form, or in multiple forms, for example, as multiple separate pills. The molecules can be packed together or separately, in a single package or in a plurality of packages. One or all of the therapeutic agents can be given in multiple doses. If not simultaneous, the timing between the multiple doses may vary to as much as about a month.

[0422] Molecules described herein can be administered before, during, or after the occurrence of a disease or condition, and the timing of administering the composition containing a compound can vary. For example, the pharmaceutical compositions can be used as a prophylactic and can be administered continuously to subjects with a propensity to conditions or diseases in order to prevent the occurrence of the disease or condition. The molecules and pharmaceutical compositions can be administered to a subject during or as soon as possible after the onset of the symptoms. The administration of the molecules can be initiated within the first 48 hours of the onset of the symptoms, within the first 24 hours of the onset of the symptoms, within the first 6 hours of the onset of the symptoms, or within 3 hours of the onset of the symptoms. The initial administration can be via any route practical, such as by any route described herein using any formulation described herein. A molecule can be administered as soon as is practicable after the onset of a disease or condition is detected or suspected, and for a length of time necessary for the treatment of the disease, such as, for example, from about 1 month to about 3 months. The length of treatment can vary for each subject.

[0423] A molecule can be packaged into a biological compartment. A biological compartment comprising the molecule can be administered to a subject. Biological compartments can include, but are not limited to, viruses (lentivirus, adenovirus), nanospheres, liposomes, quantum dots, nanoparticles, microparticles, nanocapsules, vesicles, polyethylene glycol particles, hydrogels, and micelles.

[0424] For example, a biological compartment can comprise a liposome. A liposome can be a self-assembling structure comprising one or more lipid bilayers, each of which can comprise two monolayers containing oppositely oriented amphipathic lipid molecules. Amphipathic lipids can comprise a polar (hydrophilic) headgroup covalently linked to one or two or more non-polar (hydrophobic) acyl or alkyl chains. Energetically unfavorable contacts between the hydrophobic acyl chains and a surrounding aqueous medium induce amphipathic lipid molecules to arrange themselves such that polar headgroups can be oriented towards the bilayer's surface and acyl chains are oriented towards the interior of the bilayer, effectively shielding the acyl chains from contact with the aqueous environment.

[0425] Examples of preferred amphipathic compounds used in liposomes can include phosphoglycerides and sphingolipids, representative examples of which include phosphatidylcholine, phosphatidylethanolamine, phosphatidylserine, phosphatidylinositol, phosphatidic acid, phosphatidylglycerol, palmitoyloleoyl phosphatidylcholine, lysophosphatidylcholine, lysophosphatidylethanolamine, dimyristoylphosphatidylcholine (DMPC), dipalmitoylphosphatidylcholine (DPPC), diolcoylphosphatidylcholine, distearoylphosphatidylcholine (DSPC), dilinoleoylphosphatidylcholine and egg sphingomyelin, or any combination thereof.

[0426] A biological compartment can comprise a nanoparticle. A nanoparticle can comprise a diameter of from about 40 nanometers to about 1.5 micrometers, from about 50 nanometers to about 1.2 micrometers, from about 60 nanometers to about 1 micrometer, from about 70 nanometers to about 800 nanometers, from about 80 nanometers to about 600 nanometers, from about 90 nanometers to about 400 nanometers, from about 100 nanometers to about 200 nanometers.

[0427] In some instances, as the size of the nanoparticle increases, the release rate can be slowed or prolonged and as the size of the nanoparticle decreases, the release rate can be increased.

[0428] The amount of albumin in the nanoparticles can range from about 5% to about 85% albumin (v/v), from about 10% to about 80%, from about 15% to about 80%, from about 20% to about 70% albumin (v/v), from about 25% to about 60%, from about 30% to about 50%, or from about 35% to about 40%. The pharmaceutical composition can comprise up to 30, 40, 50, 60, 70 or 80% or more of the nanoparticle. In some instances, the nucleic acid molecules of the disclosure can be bound to the surface of the nanoparticle.

[0429] A biological compartment can comprise a virus. The virus can be a delivery system for the pharmaceutical compositions of the disclosure. Exemplary viruses can include lentivirus, retrovirus, adenovirus, herpes simplex virus I or II, parvovirus, reticuloendotheliosis virus, and adeno-associated virus (AAV). Pharmaceutical compositions of the disclosure can be delivered to a cell using a virus. The virus can infect and transduce the cell in vivo, ex vivo, or in vitro. In ex vivo and in vitro delivery, the transduced cells can be administered to a subject in need of therapy.

[0430] Pharmaceutical compositions can be packaged into viral delivery systems. For example, the compositions can be packaged into virions by a HSV-1 helper virus-free packaging system.

[0431] Viral delivery systems (e.g., viruses comprising the pharmaceutical compositions of the disclosure) can be administered by direct injection, stereotaxic injection, intracerebroventricularly, by minipump infusion systems, by convection, catheters, intravenous, parenteral, intraperitoneal, and/or subcutaenous injection, to a cell, tissue, or organ of a subject in need. In some instances, cells can be transduced in vitro or ex vivo with viral delivery systems. The transduced cells can be administered to a subject having a disease. For example, a stem cell can be transduced with a viral delivery system comprising a pharmaceutical composition and the stem cell can be implanted in the patient to treat a disease. In some instances, the dose of transduced cells given to a subject can be about 1×10⁵ cells/kg, about 5×10⁵ cells/kg, about 1×10⁶ cells/kg, about 2×10⁶ cells/kg, about 3×10⁶ cells/kg, about 4×10⁶ cells/kg, about 5×10⁶ cells/kg, about 6×10⁶ cells/kg, about 7×10⁶ cells/kg, about 8×10⁶ cells/kg, about 9×10⁶ cells/kg, about 1×10⁷ cells/kg, about 5×10⁷ cells/kg, about 1×10⁸ cells/kg, or more in one single dose.

[0432] Pharmaceutical compositions in biological compartments can be used to treat inflammatory diseases such as arthritis, cancers, such as, for example, bone cancer, breast cancer, skin cancer, prostate cancer, liver cancer, lung cancer, throat cancer and kidney cancer, bacterial infections, to treat nerve damage, lung, liver and kidney diseases, eye treatment, spinal cord injuries, heart disease, arterial disease.

[0433] Introduction of the biological compartments into cells can occur by viral or bacteriophage infection, transfection, conjugation, protoplast fusion, lipofection, electroporation, calcium phosphate precipitation, polyethyleneimine (PEI)-mediated transfection, DEAE-dextran mediated transfection, liposome-mediated transfection, particle gun technology, calcium phosphate precipitation, direct micro-injection, nanoparticle-mediated nucleic acid delivery, and the like.

### Dosage

[0434] Pharmaceutical compositions described herein can be in unit dosage forms suitable for single administration of precise dosages. In unit dosage form, the formulation can be divided into unit doses containing appropriate quantities of one or more compounds. The unit dosage can be in the form of a package containing discrete quantities of the formulation. Non-limiting examples can include packaged tablets or capsules, and powders in vials or ampoules. Aqueous suspension compositions can be packaged in single-dose non-reclosable containers. Multiple-dose reclosable containers can be used, for example, in combination with a preservative. Formulations for parenteral injection can be presented in unit dosage form, for example, in ampoules, or in multi-dose containers with a preservative.

[0435] A molecule described herein can be present in a composition in a range of from about 1 mg to about 2000 mg; from about 5 mg to about 1000 mg, from about 10 mg to about 25 mg to 500 mg, from about 50 mg to about 250 mg, from about 100 mg to about 200 mg, from about 1 mg to about 50 mg, from about 50 mg to about 100 mg, from about 100 mg to about 150 mg, from about 150 mg to about 200 mg, from about 200 mg to about 250 mg, from about 250 mg to about 300 mg, from about 300 mg to about 350 mg, from about 350 mg to about 400 mg, from about 400 mg to about 450 mg, from about 450 mg to about 500 mg, from about 500 mg to about 550 mg, from about 550 mg to about 600 mg, from about 600 mg to about 650 mg, from about 650 mg to about 700 mg, from about 700 mg to about 750 mg, from about 750 mg to about 800 mg, from about 800 mg to about 850 mg, from about 850 mg to about 900 mg, from about 900 mg to about 950 mg, or from about 950 mg to about 1000 mg.

[0436] A molecule described herein can be present in a composition in an amount of about 1 mg, about 2 mg, about 3 mg, about 4 mg, about 5 mg, about 10 mg, about 15 mg, about 20 mg, about 25 mg, about 30 mg, about 35 mg, about 40 mg, about 45 mg, about 50 mg, about 55 mg, about 60 mg, about 65 mg, about 70 mg, about 75 mg, about 80 mg, about 85 mg, about 90 mg, about 95 mg, about 100 mg, about 125 mg, about 150 mg, about 175 mg, about 200 mg, about 250 mg, about 300 mg, about 350 mg, about 400 mg, about 450 mg, about 500 mg, about 550 mg, about 600 mg, about 650 mg, about 700 mg, about 750 mg, about 800 mg, about 850 mg, about 900 mg, about 950 mg, about 1000 mg, about 1050 mg, about 1100 mg, about 1150 mg, about 1200 mg, about 1250 mg, about 1300 mg, about 1350 mg, about 1400 mg, about 1450 mg, about 1500 mg, about 1550 mg, about 1600 mg, about 1650 mg, about 1700 mg, about 1750 mg, about 1800 mg, about 1850 mg, about 1900 mg, about 1950 mg, or about 2000 mg.

[0437] A molecule (e.g., site-directed polypeptide, nucleic acid-targeting nucleic acid and/or complex of a site-directed polypeptide and a nucleic acid-targeting nucleic acid) described herein can be present in a composition that provides at least 0.1, 0.5, 1, 1.5, 2, 2.5 3, 3.5, 4, 4.5, 5, 5.5, 6, 6.5, 10 or more units of activity/mg molecule. In some embodiments, the total number of units of activity of the molecule delivered to a subject is at least 25,000, 30,000, 35,000, 40,000, 45,000, 50,000, 60,000, 70,000, 80,000, 90,000, 110,000, 120,000, 130,000, 140,000, 150,000, 160,000, 170,000, 180,000, 190,000, 200,000, 210,000, 220,000, 230,000, or 250,000 or more units. In some embodiments, the total number of units of activity of the molecule delivered to a subject is at most 25,000, 30,000, 35,000, 40,000, 45,000, 50,000, 60,000, 70,000, 80,000, 90,000, 110,000, 120,000, 130,000, 140,000, 150,000, 160,000, 170,000, 180,000, 190,000, 200,000, 210,000, 220,000, 230,000, or 250,000 or more units.

[0438] In some embodiments, at least about 10,000 units of activity is delivered to a subject, normalized per 50 kg body weight. In some embodiments, at least about 10,000, 15,000, 25,000, 30,000, 35,000, 40,000, 45,000, 50,000, 60,000, 70,000, 80,000, 90,000, 110,000, 120,000, 130,000, 140,000, 150,000, 160,000, 170,000, 180,000, 190,000, 200,000, 210,000, 220,000, 230,000, or 250,000 units or more of activity of the molecule is delivered to the subject, normalized per 50 kg body weight. In some embodiments, a therapeutically effective dose comprises at least 5×10⁵, 1×10⁶, 2×10⁶, 3×10⁶, 4, 10⁶, 5×10⁶, 6×10⁶, 7×10⁶, 8×10⁶, 9×10⁶, 1×10⁷, 1.1×10⁷, 1.2×10⁷, 1.5×10⁷, 1.6×10⁷, 1.7×10⁷, 1.8×10⁷, 1.9×10⁷, 2×10⁷, 2.1×10⁷, or 3×10⁷ or more units of activity of the molecule. In some embodiments, a therapeutically effective dose comprises at most 5×10⁵, 1×10⁶, 2×10⁶, 3×10⁶, 4, 10⁶, 5×10⁶, 6×10⁶, 7×10⁶, 8×10⁶, 9×10⁶, 1×10⁷, 1.1×10⁷, 1.2×10⁷, 1.5×10⁷, 1.6×10⁷, 1.7×10⁷, 1.8×10⁷, 1.9×10⁷, 2×10⁷, 2.1×10⁷, or 3×10⁷ or more units of activity of the molecule.

[0439] In some embodiments, a therapeutically effective dose is at least about 10,000, 15,000, 20,000, 22,000, 24,000, 25,000, 30,000, 40,000, 50,000, 60,000, 70,000, 80,000, 90,000, 100,000, 125,000, 150,000, 200,000, or 500,000 units/kg body weight. In some embodiments, a therapeutically effective dose is at most about 10,000, 15,000, 20,000, 22,000, 24,000, 25,000, 30,000, 40,000, 50,000, 60,000, 70,000, 80,000, 90,000, 100,000, 125,000, 150,000, 200,000, or 500,000 units/kg body weight.

[0440] In some embodiments, the activity of the molecule delivered to a subject is at least 10,000, 11,000, 12,000, 13,000, 14,000, 20,000, 21,000, 22,000, 23,000, 24,000, 25,000, 26,000, 27,000, 28,000, 30,000, 32,000, 34,000, 35,000, 36,000, 37,000, 40,000, 45,000, or 50,000 or more U/mg of molecule. In some embodiments, the activity of the molecule delivered to a subject is at most 10,000, 11,000, 12,000, 13,000, 14,000, 20,000, 21,000, 22,000, 23,000, 24,000, 25,000, 26,000, 27,000, 28,000, 30,000, 32,000, 34,000, 35,000, 36,000, 37,000, 40,000, 45,000, or 50,000 or more U/mg of molecule.

### Pharmacokinetic and Pharmacodynamic Measurements

[0441] Pharmacokinetic and pharmacodynamic data can be obtained by various experimental techniques. Appropriate pharmacokinetic and pharmacodynamic profile components describing a particular composition can vary due to variations in drug metabolism in human subjects. Pharmacokinetic and pharmacodynamic profiles can be based on the determination of the mean parameters of a group of subjects. The group of subjects includes any reasonable number of subjects suitable for determining a representative mean, for example, 5 subjects, 10 subjects, 15 subjects, 20 subjects, 25 subjects, 30 subjects, 35 subjects, or more. The mean can be determined by calculating the average of all subject's measurements for each parameter measured. A dose can be modulated to achieve a desired pharmacokinetic or pharmacodynamics profile, such as a desired or effective blood profile, as described herein.

[0442] The pharmacokinetic parameters can be any parameters suitable for describing a molecule. For example, the Cₘₐₓ can be, for example, not less than about 25 ng/ml; not less than about 50 ng/mL; not less than about 75 ng/ml; not less than about 100 ng/ml; not less than about 200 ng/mL; not less than about 300 ng/ml; not less than about 400 ng/ml; not less than about 500 ng/mL; not less than about 600 ng/ml; not less than about 700 ng/ml; not less than about 800 ng/ml; not less than about 900 ng/ml; not less than about 1000 ng/ml; not less than about 1250 ng/ml; not less than about 1500 ng/ml; not less than about 1750 ng/ml; not less than about 2000 ng/ml; or any other Cₘₐₓ appropriate for describing a pharmacokinetic profile of a molecule described herein.

[0443] The Tₘₐₓ of a molecule described herein can be, for example, not greater than about 0.5 hours, not greater than about 1 hours, not greater than about 1.5 hours, not greater than about 2 hours, not greater than about 2.5 hours, not greater than about 3 hours, not greater than about 3.5 hours, not greater than about 4 hours, not greater than about 4.5 hours, not greater than about 5 hours, or any other Tₘₐₓ appropriate for describing a pharmacokinetic profile of a molecule described herein.

[0444] The AUC_{(0-inf)} of a molecule described herein can be, for example, not less than about 50 ng/hr/mL, not less than about 100 ng/hr/mL, not less than about 150 ng/hr/mL, not less than about 200 ng/hr/mL, not less than about 250 ng/hr/mL, not less than about 300 ng/hr/mL, not less than about 350 ng/hr/mL, not less than about 400 ng/hr/mL, not less than about 450 ng/hr/mL, not less than about 500 ng/hr/mL, not less than about 600 ng/hr/mL, not less than about 700 ng/hr/mL, not less than about 800 ng/hr/mL, not less than about 900 ng/hr/mL, not less than about 1000 ng/hr/mL, not less than about 1250 ng/hr/mL, not less than about 1500 ng/hr/mL, not less than about 1750 ng/hr/mL, not less than about 2000 ng/hr/mL, not less than about 2500 ng/hr/mL, not less than about 3000 ng/hr/mL, not less than about 3500 ng/hr/mL, not less than about 4000 ng/hr/mL, not less than about 5000 ng/hr/mL, not less than about 6000 ng/hr/mL, not less than about 7000 ng/hr/mL, not less than about 8000 ng/hr/mL, not less than about 9000 ng/hr/mL, not less than about 10,000 ng/hr/mL, or any other AUC (0-inf) appropriate for describing a pharmacokinetic profile of a molecule described herein.

[0445] The plasma concentration of a molecule described herein about one hour after administration can be, for example, not less than about 25 ng/mL, not less than about 50 ng/ml, not less than about 75 ng/ml, not less than about 100 ng/ml, not less than about 150 ng/mL, not less than about 200 ng/ml, not less than about 300 ng/ml, not less than about 400 ng/mL, not less than about 500 ng/mL, not less than about 600 ng/ml, not less than about 700 ng/mL, not less than about 800 ng/mL, not less than about 900 ng/ml, not less than about 1000 ng/ml, not less than about 1200 ng/mL, or any other plasma concentration of a molecule described herein.

[0446] The pharmacodynamic parameters can be any parameters suitable for describing pharmaceutical compositions of the disclosure. For example, the pharmacodynamic profile can exhibit decreases in factors associated with inflammation after, for example, about 2 hours, about 4 hours, about 8 hours, about 12 hours, or about 24 hours.

### Pharmaceutically-Acceptable Salts

[0447] The disclosure provides the use of pharmaceutically-acceptable salts of any molecule described herein. Pharmaceutically-acceptable salts can include, for example, acid-addition salts and base-addition salts. The acid that is added to the compound to form an acid-addition salt can be an organic acid or an inorganic acid. A base that is added to the compound to form a base-addition salt can be an organic base or an inorganic base. In some embodiments, a pharmaceutically-acceptable salt is a metal salt. In some embodiments, a pharmaceutically-acceptable salt is an ammonium salt.

[0448] Metal salts can arise from the addition of an inorganic base to a compound of the invention. The inorganic base consists of a metal cation paired with a basic counterion, such as, for example, hydroxide, carbonate, bicarbonate, or phosphate. The metal can be an alkali metal, alkaline earth metal, transition metal, or main group metal. In some embodiments, the metal is lithium, sodium, potassium, cesium, cerium, magnesium, manganese, iron, calcium, strontium, cobalt, titanium, aluminum, copper, cadmium, or zinc.

[0449] In some embodiments, a metal salt is a lithium salt, a sodium salt, a potassium salt, a cesium salt, a cerium salt, a magnesium salt, a manganese salt, an iron salt, a calcium salt, a strontium salt, a cobalt salt, a titanium salt, an aluminum salt, a copper salt, a cadmium salt, or a zinc salt, or any combination thereof.

[0450] Ammonium salts can arise from the addition of ammonia or an organic amine to a compound of the invention. In some embodiments, the organic amine is triethyl amine, diisopropyl amine, ethanol amine, diethanol amine, triethanol amine, morpholine, N-methylmorpholine, piperidine, N-methylpiperidine, N-ethylpiperidine, dibenzylamine, piperazine, pyridine, pyrrazole, pipyrrazole, imidazole, pyrazine, or pipyrazine, or any combination thereof.

[0451] In some embodiments, an ammonium salt is a triethyl amine salt, a diisopropyl amine salt, an ethanol amine salt, a diethanol amine salt, a triethanol amine salt, a morpholine salt, an N-methylmorpholine salt, a piperidine salt, an N-methylpiperidine salt, an N-ethylpiperidine salt, a dibenzylamine salt, a piperazine salt, a pyridine salt, a pyrrazole salt, a pipyrrazole salt, an imidazole salt, a pyrazine salt, or a pipyrazine salt, or any combination thereof.

[0452] Acid addition salts can arise from the addition of an acid to a molecule of the disclosure. In some embodiments, the acid is organic. In some embodiments, the acid is inorganic. In some embodiments, the acid is hydrochloric acid, hydrobromic acid, hydroiodic acid, nitric acid, nitrous acid, sulfuric acid, sulfurous acid, a phosphoric acid, isonicotinic acid, lactic acid, salicylic acid, tartaric acid, ascorbic acid, gentisinic acid, gluconic acid, glucaronic acid, saccaric acid, formic acid, benzoic acid, glutamic acid, pantothenic acid, acetic acid, propionic acid, butyric acid, fumaric acid, succinic acid, methanesulfonic acid, ethanesulfonic acid, benzenesulfonic acid, p-toluenesulfonic acid, citric acid, oxalic acid, or maleic acid, or any combination thereof.

[0453] In some embodiments, the salt is a hydrochloride salt, a hydrobromide salt, a hydroiodide salt, a nitrate salt, a nitrite salt, a sulfate salt, a sulfite salt, a phosphate salt, isonicotinate salt, a lactate salt, a salicylate salt, a tartrate salt, an ascorbate salt, a gentisinate salt, a gluconate salt, a glucaronate salt, a saccarate salt, a formate salt, a benzoate salt, a glutamate salt, a pantothenate salt, an acetate salt, a propionate salt, a butyrate salt, a fumarate salt, a succinate salt, a methanesulfonate salt, an ethanesulfonate salt, a benzenesulfonate salt, a p-toluenesulfonate salt, a citrate salt, an oxalate salt, or a maleate salt, or any combination thereof.

### Engineered Site-Directed Polypeptides

### General Overview

[0454] The disclosure describes methods, compositions, systems, and/or kits for modifying site-directed polypeptides (e.g., Cas9, Csy4, Cas5, Cas6, Argonaut, etc.) and/or related enzymes. Modifications may include any covalent or non-covalent modification to site-directed polypeptides. In some cases, this may include chemical modifications to one or more regions of the site-directed polypeptide. In some cases, modifications may include conservative or non-conservative amino acid substitutions of the site-directed polypeptide. In some cases, modifications may include the addition, deletion or substitution of any portion of the site-directed polypeptide with amino acids, peptides, or domains that are not found in the native site-directed polypeptide. In some cases, one or more non-native domains may be added, deleted or substituted in the site-directed polypeptide. In some cases the site-directed polypeptide may exist as a fusion protein.

[0455] In some cases, the present disclosure provides for the engineering of site-directed polypeptides to recognize a desired target nucleic acid sequence with desired enzyme specificity and/or activity. Modifications to a site-directed polypeptide can be performed through protein engineering. Protein engineering can include fusing functional domains to such engineered site-directed polypeptide which can be used to modify the functional state of the overall site-directed polypeptide or the actual target nucleic acid sequence of an endogenous cellular locus. The site-directed polypeptide of the disclosure can be used to regulate endogenous gene expression, both through activation and repression of endogenous gene transcription.

[0456] The site-directed polypeptide-fusions can also be linked to other regulatory or functional domains, for example nucleases, transposases or methylases, to modify endogenous chromosomal sequences. In some cases, the site-directed polypeptide may be linked to at least one or more regulatory domains, described herein. Non-limiting examples of regulatory or functional domains include transcription factor repressor or activator domains such as KRAB and VP16, co-repressor and co-activator domains, DNA methyl transferases, histone acetyltransferases, histone deacetylases, and DNA cleavage domains such as the cleavage domain from the endonuclease FokI.

[0457] In some instances, one or more specific domains, regions or structural elements of the site-directed polypeptide can be modified together. Modifications to the site-directed polypeptide may occur, but are not limited to site-directed polypeptide elements such as regions that recognize or bind to the spacer-adjacent motif (PAM), and/or regions that bind or recognize the nucleic acid-targeting nucleic acid. Such binding or recognition elements may include a conserved bridging helix, highly basic region, N-terminal region, C-terminal region, RuvC motifs (e.g., RuvC and/or RuvC-like nuclease domains) and one or more nuclease domains, such as HNH and/or HNH-like domains. Modifications may be made to additional domains, structural elements, sequence or amino acids within the site-directed polypeptide.

[0458] Modifications to one or more region of the site-directed polypeptide may be performed to alter various properties of the site-directed polypeptide. In some cases, modifications may alter binding recognition for certain nucleic acid target sequences. This may include but is not limited to increasing binding affinity and/or specificity to certain sequences or preferentially targeting of certain target nucleic acid sequences/recognition elements. In some cases, modifications may be used to alter native nuclease function. In some cases, modifications to the site-directed polypeptide may alter PAM specificity, tracrRNA specificity, crRNA specificity, or specificity for additional nucleic acid elements, such as a nucleic acid-targeting nucleic acid.

[0459] Described herein are also compositions and methods including fusion proteins comprising a site-directed polypeptide (e.g., Cas9) and one or more domains or regions engineered for genomic editing (e.g., cleaving of genes; alteration of genes, for example by cleavage followed by insertion (physical insertion or insertion via homology-directed repair) of an exogenous sequence and/or cleavage followed by NHEJ; partial or complete inactivation of one or more genes; generation of alleles with altered functional states of endogenous genes, insertion of regulatory elements; etc.) and alterations of the genome which are carried into the germline. Also disclosed are methods of making and using these compositions (i.e. reagents), for example to edit (i.e. alter) one or more genes in a target cell. Thus, the methods and compositions described herein provide highly efficient methods for targeted gene alteration (e.g., knock-in) and/or knockout (partial or complete) of one or more genes and/or for randomized mutation of the sequence of any target allele, and, therefore, allow for the generation of animal models of human diseases. One skilled in the art will recognize that although the term “genome engineering” or “genomic editing” is often used to describe the methods herein, the methods and compositions described herein can also be used to alter any target nucleic acid that may not be strictly speaking in the genome of a cell (e.g. can be used on a synthetic nucleic acid, a plasmid, a vector, a viral nucleic acid, a recombinant nucleic acid, etc.).

[0460] The methods and compositions described herein allow for novel therapeutic applications, (e.g., prevention and/or treatment of: genetic diseases, cancer, fungal, protozoal, bacterial, and viral infection, ischemia, vascular disease, arthritis, immunological disorders, etc.), novel diagnostics (e.g. prediction and/or diagnosis of a condition) as well as providing for research tools (e.g. kits, functional genomics assays, and generating engineered cell lines and animal models for research and drug screening), and means for developing plants with altered phenotypes, including but not limited to, increased disease resistance, and altering fruit ripening characteristics, sugar and oil composition, yield, and color. The methods and compositions described herein allow for novel epigenetic studies.

### Protein Modifications and Engineering

### Amino Acid Alterations

[0461] Site-directed polypeptides, as disclosed herein, can be modified. The modification can comprise modifications to an amino acid of the site-directed polypeptide. The modifications can alter the primary amino acid sequence and/or the secondary, tertiary, and quaternary amino acid structure. In some cases some amino acid sequences of site-directed polypeptide of the invention can be varied without a significant effect on the structure or function of the protein. The type of mutation may be completely unimportant if the alteration occurs in some regions (e.g. a non-critical) region of the protein. In some cases, depending upon the location of the replacement, the mutation may not have a major effect on the biological properties of the resulting variant. For example, properties and functions of the Cas9 variants can be of the same type as wild-type Cas9. In some cases, the mutation can critically impact the structure and/or function of the site-directed polypeptide.

[0462] The location of where to modify a site-directed polypeptide (e.g., a Cas9 variant) can be determined using sequence and/or structural alignment. Sequence alignment can identify regions of a polypeptide that similar and/or dissimilar (e.g., conserved, not conserved, hydrophobic, hydrophilic, etc). In some instances, a region in the sequence of interest that is similar to other sequences is suitable for modification. In some instances, a region in the sequence of interest that is dissimilar from other sequences is suitable for modification. For example, sequence alignment can be performed by database search, pairwise alignment, multiple sequence alignment, genomic analysis, motif finding, benchmarking, and/or programs such as BLAST, CS-BLAST, HHPRED, psi-BLAST, LALIGN, PyMOL, and SEQALN. Structural alignment can be performed by programs such as Dali, PHYRE, Chimera, COOT, O, and PyMOL. Alignment can be performed by database search, pairwise alignment, multiple sequence alignment, genomic analysis, motif finding, or bench marking, or any combination thereof.

[0463] A site-directed polypeptide can be modified to increase binding specificity to a nucleic acid-targeting nucleic acid and/or a target nucleic acid. A site-directed polypeptide can be modified to increase binding to specific regions of a nucleic acid-targeting nucleic acid (e.g., the spacer extension, the spacer, the minimum CRISPR repeat, the minimum tracrRNA sequence, the 3′ tracrRNA sequence, the tracrRNA extension) and/or a target nucleic acid.

[0464] In some cases, the modification can comprise a conservative modification. A conservative amino acid change can involve substitution of one of a family of amino acids which are related in their side chains (e.g, cysteine/serine)

[0465] In some cases amino acid changes in the Cas9 protein disclosed herein are non-conservative amino acid changes, (i.e., substitutions of dissimilar charged or uncharged amino acids). A non-conservative amino acid change can involve substitution of one of a family of amino acids which may be unrelated in their side chains or a substitution that alters biological activity of the site-directed polypeptide.

[0466] The mutation of amino acids can also change the selectivity of binding to a target nucleic acid. The mutation may result in a change that may comprise a change in the dissociation constant (Kd) of binding between a mutated site-directed polypeptide and a target nucleic acid. The change in Kd of binding between a mutated site-directed polypeptide and a target nucleic acid may be more than 1000-fold, more than 500-fold, more than 100-fold, more than 50-fold, more than 25-fold, more than 10-fold, more than 5-fold, more than 4-fold, more than 3-fold, more than 2-fold higher or lower than the Kd of binding of binding between a non-mutated site-directed polypeptide and a target nucleic acid. The change in Kd of binding between a mutated site-directed polypeptide and a target nucleic acid may be less than 1000-fold, less than 500-fold, less than 100-fold, less than 50-fold, less than 25-fold, less than 10-fold, less than 5-fold, less than 4-fold, less than 3-fold, less than 2-fold higher or lower than the Kd of binding of binding between a non-mutated site-directed polypeptide and a target nucleic acid.

[0467] The mutation may result in a change that may comprise a change in K_{d} of binding between a mutated site-directed polypeptide and a PAM motif. The change in K_{d} of binding between a mutated site-directed polypeptide and a PAM motif may be more than 1000-fold, more than 500-fold, more than 100-fold, more than 50-fold, more than 25-fold, more than 10-fold, more than 5-fold, more than 4-fold, more than 3-fold, more than 2-fold higher or lower than the K_{d} of binding between a non-mutated site-directed polypeptide and a PAM motif. The change in K_{d} of binding between a mutated site-directed polypeptide and a PAM motif may be less than 1000-fold, less than 500-fold, less than 100-fold, less than 50-fold, less than 25-fold, less than 10-fold, less than 5-fold, less than 4-fold, less than 3-fold, less than 2-fold higher or lower than the K_{d} of binding of binding between a non-mutated site-directed polypeptide and a PAM motif.

[0468] The mutation may result in a change that may comprise a change in K_{d} of the binding between a mutated site-directed polypeptide and a nucleic acid-targeting nucleic acid. The change in K_{d} of binding between a mutated site-directed polypeptide and a nucleic acid-targeting nucleic acid may be more than 1000-fold, more than 500-fold, more than 100-fold, more than 50-fold, more than 25-fold, more than 10-fold, more than 5-fold, more than 4-fold, more than 3-fold, more than 2-fold higher or lower than the K_{d} of binding between a non-mutated site-directed polypeptide and a nucleic acid-targeting nucleic acid. The change in K_{d} of binding between a mutated site-directed polypeptide and a nucleic acid-targeting nucleic acid may be less than 1000-fold, less than 500-fold, less than 100-fold, less than 50-fold, less than 25-fold, less than 10-fold, less than 5-fold, less than 4-fold, less than 3-fold, less than 2-fold higher or lower than the K_{d} of binding between a non-mutated site-directed polypeptide and a nucleic acid-targeting nucleic acid.

[0469] The mutation of a site-directed polypeptide can also change the kinetics of the enzymatic action of the site-directed polypeptide. The mutation may result in a change that may comprise a change in the Kₘ of the mutated site-directed polypeptide. The change in Kₘ of the mutated site-directed polypeptide may be more than 1000-fold, more than 500-fold, more than 100-fold, more than 50-fold, more than 25-fold, more than 10-fold, more than 5-fold, more than 4-fold, more than 3-fold, more than 2-fold higher or lower than the Kₘ of a non-mutated site-directed polypeptide. The change in Kₘ of a mutated site-directed polypeptide may be less than 1000-fold, less than 500-fold, less than 100-fold, less than 50-fold, less than 25-fold, less than 10-fold, less than 5-fold, less than 4-fold, less than 3-fold, less than 2-fold higher or lower than the Kₘ of a non-mutated site-directed polypeptide.

[0470] The mutation of a site-directed polypeptide may result in a change that may comprise a change in the turnover of the site-directed polypeptide. The change in the turnover of the mutated site-directed polypeptide may be more than 1000-fold, more than 500-fold, more than 100-fold, more than 50-fold, more than 25-fold, more than 10-fold, more than 5-fold, more than 4-fold, more than 3-fold, more than 2-fold higher or lower than the turnover of a non-mutated site-directed polypeptide. The change in the turnover of a mutated site-directed polypeptide may be less than 1000-fold, less than 500-fold, less than 100-fold, less than 50-fold, less than 25-fold, less than 10-fold, less than 5-fold, less than 4-fold, less than 3-fold, less than 2-fold higher or lower than the turnover of a non-mutated site-directed polypeptide.

[0471] The mutation may result in a change that may comprise a change in the ΔG of the enzymatic action of the site-directed polypeptide. The change in the ΔG of the mutated site-directed polypeptide may be more than 1000-fold, more than 500-fold, more than 100-fold, more than 50-fold, more than 25-fold, more than 10-fold, more than 5-fold, more than 4-fold, more than 3-fold, more than 2-fold higher or lower than the ΔG of a non-mutated site-directed polypeptide. The change in the turnover of a mutated site-directed polypeptide may be less than 1000-fold, less than 500-fold, less than 100-fold, less than 50-fold, less than 25-fold, less than 10-fold, less than 5-fold, less than 4-fold, less than 3-fold, less than 2-fold higher or lower than the ΔG of a non-mutated site-directed polypeptide.

[0472] The mutation may result in a change that may comprise a change in the Vₘₐₓ of the enzymatic action of the site-directed polypeptide. The change in the Vₘₐₓ of the mutated site-directed polypeptide may be more than 1000-fold, more than 500-fold, more than 100-fold, more than 50-fold, more than 25-fold, more than 10-fold, more than 5-fold, more than 4-fold, more than 3-fold, more than 2-fold higher or lower than the Vₘₐₓ of a non-mutated site-directed polypeptide. The change in the turnover of a mutated site-directed polypeptide may be less than 1000-fold, less than 500-fold, less than 100-fold, less than 50-fold, less than 25-fold, less than 10-fold, less than 5-fold, less than 4-fold, less than 3-fold, less than 2-fold higher or lower than the Vₘₐₓ of a non-mutated site-directed polypeptide.

[0473] The mutation may result in a change that may comprise a change in any kinetic parameter of the site-directed polypeptide. The mutation may result in in a change that may comprise a change in any thermodynamic parameter of the site-directed polypeptide. The mutation may result in in a change that may comprise a change in the surface charge, surface area buried, and/or folding kinetics of the site-directed polypeptide and/or enzymatic action of the site-directed polypeptide.

[0474] Amino acids in the site-directed polypeptide of the present invention that are essential for function can be identified by methods such as site-directed mutagenesis, alanine-scanning mutagenesis, protein structure analysis, nuclear magnetic resonance, photoaffinity labeling, and electron tomography, high-throughput screening, ELISAs, biochemical assays, binding assays, cleavage assays (e.g., Surveyor assay), reporter assays, and the like.

[0475] Other amino acid alterations may also include amino acids with glycosylated forms, aggregative conjugates with other molecules, and covalent conjugates with unrelated chemical moieties (e.g., pegylated molecules). Covalent variants can be prepared by linking functionalities to groups which are found in the amino acid chain or at the N- or C-terminal residue. In some cases mutated site-directed polypeptides may also include allelic variants and species variants.

[0476] Truncations of regions which do not affect functional activity of the Cas9 proteins may be engineered. Truncations of regions which do affect functional activity of the Cas9 protein may be engineered. A truncation may comprise a truncation of less than 5, less than 10, less than 15, less than 20, less than 25, less than 30, less than 35, less than 40, less than 45, less than 50, less than 60, less than 70, less than 80, less than 90, less than 100 or more amino acids. A truncation may comprise a truncation of more than 5, more than 10, more than 15, more than 20, more than 25, more than 30, more than 35, more than 40, more than 45, more than 50, more than 60, more than 70, more than 80, more than 90, more than 100 or more amino acids. A truncation may comprise truncation of about 5%, 10%, 15%, 20%, 25%, 30%, 35%, 40%, 45%, 50%, 55%, 60%, 65%, 70%, 75%, 80%, 85%, 90%, 95% or 100% of the site-directed polypeptide.

[0477] Deletions of regions which do not affect functional activity of the Cas9 proteins may be engineered. Deletions of regions which do affect functional activity of the Cas9 protein may be engineered. A deletion can comprise a deletion of less than 5, less than 10, less than 15, less than 20, less than 25, less than 30, less than 35, less than 40, less than 45, less than 50, less than 60, less than 70, less than 80, less than 90, less than 100 or more amino acids. A deletion may comprise a deletion of more than 5, more than 10, more than 15, more than 20, more than 25, more than 30, more than 35, more than 40, more than 45, more than 50, more than 60, more than 70, more than 80, more than 90, more than 100 or more amino acids. A deletion may comprise deletion of about 5%, 10%, 15%, 20%, 25%, 30%, 35%, 40%, 45%, 50%, 55%, 60%, 65%, 70%, 75%, 80%, 85%, 90%, 95% or 100% of the site-directed polypeptide. A deletion can occur at the N-terminus, the C-terminus, or at any region in the polypeptide chain.

### Screens

[0478] The disclosure provides for methods for engineering a site-directed polypeptide. Screens can be used to engineering a site-directed polypeptide. For example, a screen can be set up to screen for the effect of mutations in a region of the site-directed polypeptide. For example, a screen can be set up to test modifications of the highly basic patch on the affinity for RNA structure (e.g., nucleic acid-targeting nucleic acid structure), or processing capability (e.g., target nucleic acid cleavage). Exemplary screening methods can include but are not limited to, cell sorting methods, mRNA display, phage display, and directed evolution.

### Fusions

[0479] In some instances, the site-directed polypeptide is modified such that it comprises a non-native sequence (i.e. the polypeptide has a modification that alters it from the allele or sequence it was derived from) (e.g., the polypeptide can be referred to as a fusion). The non-native sequence can also include one or more additional proteins, protein domains, subdomains or polypeptides. For example, Cas9 may be fused with any suitable additional nonnative nucleic acid binding proteins and/or domains, including but not limited to transcription factor domains, nuclease domains, nucleic acid polymerizing domains. The non-native sequence can comprise a sequence of Cas9 and/or a Cas9 homologue.

[0480] The non-native sequence can confer new functions to the fusion protein. These functions can include for example, DNA cleavage, DNA methylation, DNA damage, DNA repair, modification of a target polypeptide associated with target DNA (e.g., a histone, a DNA-binding protein, etc.), leading to, for example, histone methylation, histone acetylation, histone ubiquitination, and the like. Other functions conferred by a fusion protein can include methyltransferase activity, demethylase activity, deamination activity, dismutase activity, alkylation activity, depurination activity, oxidation activity, pyrimidine dimer forming activity, integrase activity, transposase activity, recombinase activity, polymerase activity, ligase activity, helicase activity, photolyase activity or glycosylase activity, acetyltransferase activity, deacetylase activity, kinase activity, phosphatase activity, ubiquitin ligase activity, deubiquitinating activity, adenylation activity, deadenylation activity, SUMOylating activity, deSUMOylating activity, ribosylation activity, deribosylation activity, myristoylation activity, remodelling activity, protease activity, oxidoreductase activity, transferase activity, hydrolase activity, lyase activity, isomerase activity, synthase activity, synthetase activity, and demyristoylation activity, or any combination thereof.

### Modifications to the Bridge Helix

[0481] In some cases, the bridge helix region of Cas9 may be modified (e.g., to alter PAM specificity). In some cases, the bridge helix may share homology with the bridge helix identified in the Cas9 protein of S. pyogenes (residues 551-566). In some cases, the bridge helix may share at least 5%, 10%, 15%, 20%, 25%, 30%, 35%, 40%, 45%, 50%, 55%, 60%, 65%, 70%, 75%, 80%, 85%, 90%, 95%, 98%, 99%, or 100% homology with residues 551-556 of S. pyogenes Cas9 bridge helix. In some cases, the bridge helix may share at most 5%, 10%, 15%, 20%, 25%, 30%, 35%, 40%, 45%, 50%, 55%, 60%, 65%, 70%, 75%, 80%, 85%, 90%, 95%, 98%, 99%, or 100% homology with residues 551-556 of S. pyogenes Cas9 bridge helix.

[0482] In some cases, modifications to the bridge helix may include but are not limited to individual amino acid modifications, as described herein. In some cases, modification to the bridge helix may include but are not limited to insertions, deletions or substitution of individual amino acids, or polypeptides, such as other protein elements (e.g domains, structural motifs, proteins).

[0483] Modifications may include modifications to at least 1, 2, 3, 4, 5, 6, 7, 8, 9, 10, 11, 12, 13, 14, 15, 16, 17, 18, 19, 20 or more amino acids of the bridge helix. Modifications may include modifications to at most 1, 2, 3, 4, 5, 6, 7, 8, 9, 10, 11, 12, 13, 14, 15, 16, 17, 18, 19, 20 or more amino acids of the bridge helix. Modifications may also include at least 5%, 10%, 15%, 20%, 25%, 30%, 35%, 40%, 45%, 50%, 55%, 60%, 65%, 70%, 75%, 80%, 85%, 90%, 95%, 98%, 99%, or 100% of the bridge helix. Modifications may also include at most 5%, 10%, 15%, 20%, 25%, 30%, 35%, 40%, 45%, 50%, 55%, 60%, 65%, 70%, 75%, 80%, 85%, 90%, 95%, 98%, 99%, or 100% of the bridge helix.

[0484] In some cases, modifications to site-directed polypeptide bridge helix sequences may include particular polypeptide structural motifs, including but not limited to alpha helix, beta strand, beta sheet, 310-helix, pi-helix, polyproline I motif, polyproline II motif, polyproline III motif, beta turn, alpha-turn-alpha, or helix kinks or hinges. For example, substitutions to the site-directed polypeptide bridge helix may include substitution or addition with one or more proline amino acid residues. Insertion of proline residues may introduce kinks in the bridge helix which may alter the binding specificity of the bridge helix for the PAM. In another example, substitution or addition may include one or more glycine amino acid residues. Insertion or substitution of glycine residues may introduce increased flexibility in the bridge helix, or “hinges” which may also alter the binding specificity of the bridge helix for the PAM. Altering binding specificity may or may not affect enzymatic activity of the Cas9 protein.

[0485] In some cases, modifications to site-directed polypeptide bridge helix sequences may include deletion of at least 1%, 5%, 10%, 15%, 20%, 25%, 30%, 35%, 40%, 45%, 50%, 55%, 60%, 65%, 70%, 75%, 80%, 85%, 90%, 95%, 98%, 99%, or 100% of the bridge helix. In some cases, modifications to site-directed polypeptide bridge helix sequences may include deletion of at most 1%, 5%, 10%, 15%, 20%, 25%, 30%, 35%, 40%, 45%, 50%, 55%, 60%, 65%, 70%, 75%, 80%, 85%, 90%, 95%, 98%, 99%, or 100% of the bridge helix.

[0486] In some cases, modifications to site-directed polypeptide bridge helix sequences may include addition or substitution of at least 1%, 5%, 10%, 15%, 20%, 25%, 30%, 35%, 40%, 45%, 50%, 55%, 60%, 65%, 70%, 75%, 80%, 85%, 90%, 95%, 98%, 99%, or 100% of a homologous site-directed polypeptide bridge helix. In some cases, modifications to site-directed polypeptide bridge helix sequences may include addition or substitution of at most 1%, 5%, 10%, 15%, 20%, 25%, 30%, 35%, 40%, 45%, 50%, 55%, 60%, 65%, 70%, 75%, 80%, 85%, 90%, 95%, 98%, 99%, or 100% of a homologous site-directed polypeptide bridge helix.

[0487] For example, nonnative Cas9 bridge helices may be derived from any suitable organism. In some cases, the Cas9 protein and bridge helix may be derived from prokaryotic organisms, including but not limited to archea, bacteria, protists (e.g., E. coli, S. pyogenes, S. thermophilus, P. furiosus, and etc.).

[0488] For example, the bridge helix of the S. pyogenes Cas9 enzyme may be substituted or inserted with the bridge helix, or fragment thereof, derived from another Cas9 enzyme from a different species.

[0489] In some instances, a site-directed polypeptide comprises an amino acid sequence comprising at least 15% amino acid identity to a Cas9 from S. pyogenes, two nucleic acid-cleaving domains (i.e., a HNH domain and RuvC domain), and a modified bridge helix.

### Modifications to the Highly Basic Patch

[0490] PAM binding and specificity may also be affected by additional regions within the Cas9 protein. In some cases, a highly basic patch or region, comprising basic amino acid residues adjacent to the PAM binding site, may also be modified to alter PAM specificity. In some cases, the highly basic patch or region may share homology with the highly basic patch identified in the Cas9 of S. pyogenes contained within N-terminal region, or amino acid residues 1-270 of the S. pyogenes Cas9. In some cases, the highly basic patch may share at least 5%, 10%, 15%, 20%, 25%, 30%, 35%, 40%, 45%, 50%, 55%, 60%, 65%, 70%, 75%, 80%, 85%, 90%, 95%, 98%, 99%, or 100% homology with the S. pyogenes Cas9 highly basic patch. In some cases, the highly basic patch may share at most 5%, 10%, 15%, 20%, 25%, 30%, 35%, 40%, 45%, 50%, 55%, 60%, 65%, 70%, 75%, 80%, 85%, 90%, 95%, 98%, 99%, or 100% homology with the S. pyogenes Cas9 highly basic patch.

[0491] In some cases, modifications to the highly basic patch may include but are not limited to individual amino acid modifications, as described herein. In some cases, modification to the highly basic patch may include but are not limited to insertions, deletions or substitution of individual amino acids, or polypeptides, such as other protein elements (e.g domains, structural motifs, proteins).

[0492] Modifications may include modifications to at least 1, 2, 3, 4, 5, 6, 7, 8, 9, 10, 11, 12, 13, 14, 15, 16, 17, 18, 19, 20, 21, 22, 23, 24, 25, 26, 27, 28, 29, 30, 31, 32, 33, 34, 35, 36, 37, 38, 39, 40, 41, 42, 43, 44, 45, 46, 47, 48, 49, 50 or more amino acids of the highly basic patch. Modifications may include modifications to at most 1, 2, 3, 4, 5, 6, 7, 8, 9, 10, 11, 12, 13, 14, 15, 16, 17, 18, 19, 20, 21, 22, 23, 24, 25, 26, 27, 28, 29, 30, 31, 32, 33, 34, 35, 36, 37, 38, 39, 40, 41, 42, 43, 44, 45, 46, 47, 48, 49, 50 or more amino acids of the highly basic patch. Modifications may also include at least 5%, 10%, 15%, 20%, 25%, 30%, 35%, 40%, 45%, 50%, 55%, 60%, 65%, 70%, 75%, 80%, 85%, 90%, 95%, 98%, 99%, or 100% of the highly basic patch. Modifications may also include at most 5%, 10%, 15%, 20%, 25%, 30%, 35%, 40%, 45%, 50%, 55%, 60%, 65%, 70%, 75%, 80%, 85%, 90%, 95%, 98%, 99%, or 100% of the highly basic patch.

[0493] In some cases, modifications to highly basic patch sequence of the site-directed polypeptide may include particular polypeptide structural motifs, including but not limited to alpha helix, beta strand, beta sheet, 310-helix, pi-helix, polyproline I motif, polyproline II motif, polyproline III motif, beta turn, alpha-turn-alpha, or helix kinks or hinges.

[0494] Substitutions to the highly basic patch of the site-directed polypeptide may include substitution or addition with one or more acidic amino acid residues. Insertion of acidic residues may decrease the overall basic charge of this area of the site-directed polypeptide and may alter the binding specificity of the highly basic patch for the PAM. In another example, substitution or addition may include one or more basic amino acid residues. Insertion or substitution of basic residues may increase the charge area or ionic strength of interaction between the polypeptide and the nucleic acid and may also alter the binding specificity of the highly basic patch for the PAM. Altering binding specificity may or may not affect enzymatic activity of the site-directed polypeptide.

[0495] In some cases, modifications to the site-directed polypeptide highly basic patch sequences may include deletion of at least 1%, 5%, 10%, 15%, 20%, 25%, 30%, 35%, 40%, 45%, 50%, 55%, 60%, 65%, 70%, 75%, 80%, 85%, 90%, 95%, 98%, 99%, or 100% of the highly basic patch. In some cases, modifications to site-directed polypeptide highly basic patch sequences may include deletion of at most 1%, 5%, 10%, 15%, 20%, 25%, 30%, 35%, 40%, 45%, 50%, 55%, 60%, 65%, 70%, 75%, 80%, 85%, 90%, 95%, 98%, 99%, or 100% of the highly basic patch.

[0496] In some cases, modifications to site-directed polypeptide highly basic patch sequences may include addition or substitution of at least 1%, 5%, 10%, 15%, 20%, 25%, 30%, 35%, 40%, 45%, 50%, 55%, 60%, 65%, 70%, 75%, 80%, 85%, 90%, 95%, 98%, 99%, or 100% of a homologous Cas9 highly basic patch. In some cases, modifications to the site-directed polypeptide highly basic patch sequences may include addition or substitution of at most 1%, 5%, 10%, 15%, 20%, 25%, 30%, 35%, 40%, 45%, 50%, 55%, 60%, 65%, 70%, 75%, 80%, 85%, 90%, 95%, 98%, 99%, or 100% of a homologous Cas9 highly basic patch.

[0497] Homologous Cas9 highly basic patch sequences may be derived from any suitable organism. In some cases, the Cas9 protein may be derived from prokaryotic organisms such as archea, bacteria, protists (e.g., E. coli, S. pyogenes, S. thermophilus, P. furiosus, and etc.).

[0498] For example, the highly basic patch of the S. pyogenes Cas9 enzyme may be substituted or inserted with the highly basic patch, or fragment thereof, derived from a Cas9 of another species.

[0499] In some instances, a site-directed polypeptide comprises an amino acid sequence comprising at least 15% amino acid identity to a Cas9 from S. pyogenes, two nucleic acid-cleaving domains (i.e., a HNH domain and RuvC domain), and a modified highly basic patch.

### Modifications to the HNH Domain

[0500] In some cases, the HNH domain in a site-directed polypeptide may be modified to alter PAM specificity. In some cases, the HNH domain may share homology with the HNH domain identified in the C terminal domain of the Cas9 protein of S. pyogenes (residues 860-1100). In some cases, the HNH domain may share at least 5%, 10%, 15%, 20%, 25%, 30%, 35%, 40%, 45%, 50%, 55%, 60%, 65%, 70%, 75%, 80%, 85%, 90%, 95%, 98%, 99%, or 100% homology with residues 551-556 of S. pyogenes Cas9 HNH domain. In some cases, the HNH domain may share at most 5%, 10%, 15%, 20%, 25%, 30%, 35%, 40%, 45%, 50%, 55%, 60%, 65%, 70%, 75%, 80%, 85%, 90%, 95%, 98%, 99%, or 100% homology with residues 860-1100 of S. pyogenes Cas9 HNH domain.

[0501] In some cases, modifications to the HNH domain may include but are not limited to individual amino acid modifications, as described herein. In some cases, modification to the HNH domain may include but are not limited to insertions, deletions or substitution of individual amino acids, or polypeptides, such as other protein elements (e.g domains, structural motifs, proteins).

[0502] Modifications may include modifications to at least 1, 2, 3, 4, 5, 6, 7, 8, 9, 10, 11, 12, 13, 14, 15, 16, 17, 18, 19, 20 or more amino acids of the HNH domain. Modifications may include modifications to at most 1, 2, 3, 4, 5, 6, 7, 8, 9, 10, 11, 12, 13, 14, 15, 16, 17, 18, 19, 20 or more amino acids of the HNH domain. Modifications may also include at least 5%, 10%, 15%, 20%, 25%, 30%, 35%, 40%, 45%, 50%, 55%, 60%, 65%, 70%, 75%, 80%, 85%, 90%, 95%, 98%, 99%, or 100% of the HNH domain. Modifications may also include at most 5%, 10%, 15%, 20%, 25%, 30%, 35%, 40%, 45%, 50%, 55%, 60%, 65%, 70%, 75%, 80%, 85%, 90%, 95%, 98%, 99%, or 100% of the HNH domain.

[0503] In some cases, modifications to site-directed polypeptide HNH domain sequences may include particular polypeptide structural motifs, including but not limited to alpha helix, beta strand, beta sheet, 310-helix, pi-helix, polyproline I motif, polyproline II motif, polyproline III motif, beta turn, alpha-turn-alpha, or helix kinks or hinges.

[0504] Substitutions to the HNH domain of the site-directed polypeptide may include substitution or addition with one or more amino acid residues. In some cases, the HNH domain may be replaced or fused with other suitable nucleic acid binding domains. A nucleic acid-binding domain can comprise RNA. There can be a single nucleic acid-binding domain. Examples of nucleic acid-binding domains can include, but are not limited to, a helix-turn-helix domain, a zinc finger domain, a leucine zipper (bZIP) domain, a winged helix domain, a winged helix turn helix domain, a helix-loop-helix domain, a HMG-box domain, a Wor3 domain, an immunoglobulin domain, a B3 domain, a TALE domain, a Zinc-finger domain, a RNA-recognition motif domain, a double-stranded RNA-binding motif domain, a double-stranded nucleic acid binding domain, a single-stranded nucleic acid binding domains, a KH domain, a PUF domain, a RGG box domain, a DEAD/DEAH box domain, a PAZ domain, a Piwi domain, and a cold-shock domain, a RNAseH domain, a HNH domain, a RuvC-like domain, a RAMP domain, a Cas5 domain, a Cas6 domain.

[0505] In some cases, modifications to site-directed polypeptide HNH domain sequences may include deletion of at least 1%, 5%, 10%, 15%, 20%, 25%, 30%, 35%, 40%, 45%, 50%, 55%, 60%, 65%, 70%, 75%, 80%, 85%, 90%, 95%, 98%, 99%, or 100% of the HNH domain. In some cases, modifications to site-directed polypeptide HNH domain sequences may include deletion of at most 1%, 5%, 10%, 15%, 20%, 25%, 30%, 35%, 40%, 45%, 50%, 55%, 60%, 65%, 70%, 75%, 80%, 85%, 90%, 95%, 98%, 99%, or 100% of the HNH domain.

[0506] In some cases, modifications to site-directed polypeptide HNH domain sequences may include addition or substitution of at least 1%, 5%, 10%, 15%, 20%, 25%, 30%, 35%, 40%, 45%, 50%, 55%, 60%, 65%, 70%, 75%, 80%, 85%, 90%, 95%, 98%, 99%, or 100% of a homologous Cas9 HNH domain. In some cases, modifications to site-directed polypeptide HNH domain sequences may include addition or substitution of at most 1%, 5%, 10%, 15%, 20%, 25%, 30%, 35%, 40%, 45%, 50%, 55%, 60%, 65%, 70%, 75%, 80%, 85%, 90%, 95%, 98%, 99%, or 100% of a homologous Cas9 HNH domain.

[0507] Homologous Cas9 HNH domains may be derived from any suitable organism. In some cases, the Cas9 protein may be derived from prokaryotic organisms such as archea, bacteria, protists (e.g., E. coli, S. pyogenes, S. thermophilus, P. furiosus, and etc.). For example, the HNH domain of the S. pyogenes Cas9 enzyme may be substituted or inserted with the HNH domain, or fragment thereof, derived from a Cas9 enzyme of another species. In some cases, at least one homologous Cas9 HNH domain may be inserted into the HNH domain. In some cases, the at least one homologous Cas9 HNH domain may form an HNH domain array, comprising at least two HNH domains. In some cases, an HNH domain array can comprise at least one Cas9 HNH domain and at least one second HNH domain.

[0508] In some instances, the modification to the HNH or HNH-like domain can comprise insertion of the same or similar HNH or HNH-like domain in tandem (e.g., adjacent) to the HNH domain of Cas9. The HNH or HNH-like domain can be inserted N-terminal and/or C-terminal of the HNH domain in Cas9. Insertion of one or more HNH or HNH-like domains in Cas9 can be useful in extending specificity in a target nucleic acid. Insertion of one or more HNH or HNH-like domains in Cas9 can be useful in duplicating specificity in a target nucleic acid. For example, insertion of one or more HNH or HNH-like domains can configure Cas9 to recognize a longer stretch of target nucleic acid, recognize a different RNA-DNA hybrid, and/or recognize a target nucleic acid with higher binding affinity.

[0509] In some instances, a site-directed polypeptide comprises an amino acid sequence comprising at least 15% amino acid identity to a Cas9 from S. pyogenes, two nucleic acid-cleaving domains (i.e., a HNH domain and RuvC domain), and a modified HNH domain.

### Modifications to the RuvC or RuvC-Like Domains

[0510] In some cases, the RuvC or RuvC-like domain in the site-directed polypeptide may be modified to alter PAM specificity. In some cases, the RuvC or RuvC-like domain may share homology with the RuvC or RuvC-like domain identified in the Cas9 protein of S. pyogenes (residues 1-270). In some cases, the RuvC or RuvC-like domain may share at least 5%, 10%, 15%, 20%, 25%, 30%, 35%, 40%, 45%, 50%, 55%, 60%, 65%, 70%, 75%, 80%, 85%, 90%, 95%, 98%, 99%, or 100% homology with residues 551-556 of S. pyogenes Cas9 RuvC or RuvC-like domain. In some cases, the RuvC or RuvC-like domain may share at most 5%, 10%, 15%, 20%, 25%, 30%, 35%, 40%, 45%, 50%, 55%, 60%, 65%, 70%, 75%, 80%, 85%, 90%, 95%, 98%, 99%, or 100% homology with residues 1-270 of S. pyogenes Cas9 RuvC or RuvC-like domain.

[0511] In some cases, modifications to the RuvC or RuvC-like domain may include but are not limited to individual amino acid modifications, as described herein. In some cases, modification to the RuvC or RuvC-like domain may include but are not limited to insertions, deletions or substitution of individual amino acids, or polypeptides, such as other protein elements (e.g domains, structural motifs, proteins).

[0512] Modifications may include modifications to at least 1, 2, 3, 4, 5, 6, 7, 8, 9, 10, 11, 12, 13, 14, 15, 16, 17, 18, 19, 20 or more amino acids of the RuvC or RuvC-like domain. Modifications may include modifications to at most 1, 2, 3, 4, 5, 6, 7, 8, 9, 10, 11, 12, 13, 14, 15, 16, 17, 18, 19, 20 or more amino acids of the RuvC or RuvC-like domain. Modifications may also include at least 5%, 10%, 15%, 20%, 25%, 30%, 35%, 40%, 45%, 50%, 55%, 60%, 65%, 70%, 75%, 80%, 85%, 90%, 95%, 98%, 99%, or 100% of the RuvC or RuvC-like domain. Modifications may also include at most 5%, 10%, 15%, 20%, 25%, 30%, 35%, 40%, 45%, 50%, 55%, 60%, 65%, 70%, 75%, 80%, 85%, 90%, 95%, 98%, 99%, or 100% of the RuvC or RuvC-like domain.

[0513] In some cases, modifications to site-directed polypeptide RuvC or RuvC-like domain sequences may include particular polypeptide structural motifs, including but not limited to alpha helix, beta strand, beta sheet, 310-helix, pi-helix, polyproline I motif, polyproline II motif, polyproline III motif, beta turn, alpha-turn-alpha, or helix kinks or hinges.

[0514] Substitutions to the site-directed polypeptide RuvC or RuvC-like domain may include substitution or addition with one or more amino acid residues. In some cases, the RuvC or RuvC-like domain may be replaced or fused with other suitable nucleic acid binding domains. A nucleic acid-binding domain can comprise RNA. There can be a single nucleic acid-binding domain. Examples of nucleic acid-binding domains can include, but are not limited to, a helix-turn-helix domain, a zinc finger domain, a leucine zipper (bZIP) domain, a winged helix domain, a winged helix turn helix domain, a helix-loop-helix domain, a HMG-box domain, a Wor3 domain, an immunoglobulin domain, a B3 domain, a TALE domain, a Zinc-finger domain, a RNA-recognition motif domain, a double-stranded RNA-binding motif domain, a double-stranded nucleic acid binding domain, a single-stranded nucleic acid binding domains, a KH domain, a PUF domain, a RGG box domain, a DEAD/DEAH box domain, a PAZ domain, a Piwi domain, a cold-shock domain, a RNAscH domain, a HNH domain, a RuvC-like domain, a RAMP domain, a Cas5 domain, and a Cas6 domain.

[0515] In some cases, modifications to site-directed polypeptide RuvC or RuvC-like domain sequences may include deletion of at least 1%, 5%, 10%, 15%, 20%, 25%, 30%, 35%, 40%, 45%, 50%, 55%, 60%, 65%, 70%, 75%, 80%, 85%, 90%, 95%, 98%, 99%, or 100% of the RuvC or RuvC-like domain. In some cases, modifications to site-directed polypeptide RuvC or RuvC-like domain sequences may include deletion of at most 1%, 5%, 10%, 15%, 20%, 25%, 30%, 35%, 40%, 45%, 50%, 55%, 60%, 65%, 70%, 75%, 80%, 85%, 90%, 95%, 98%, 99%, or 100% of the RuvC or RuvC-like domain.

[0516] In some cases, modifications to site-directed polypeptide RuvC or RuvC-like domain sequences may include addition or substitution of at least 1%, 5%, 10%, 15%, 20%, 25%, 30%, 35%, 40%, 45%, 50%, 55%, 60%, 65%, 70%, 75%, 80%, 85%, 90%, 95%, 98%, 99%, or 100% of a homologous Cas9 RuvC or RuvC-like domain. In some cases, modifications to the site-directed polypeptide RuvC or RuvC-like domain sequences may include addition or substitution of at most 1%, 5%, 10%, 15%, 20%, 25%, 30%, 35%, 40%, 45%, 50%, 55%, 60%, 65%, 70%, 75%, 80%, 85%, 90%, 95%, 98%, 99%, or 100% of a homologous Cas9 RuvC or RuvC-like domain.

[0517] Homologous Cas9 RuvC or RuvC-like domains may be derived from any suitable organism. In some cases, the Cas9 protein may be derived from prokaryotic organisms such as archea, bacteria, protists (e.g., E. coli, S. pyogenes, S. thermophilus, P. furiosus and etc.). For example, the RuvC or RuvC-like domain of the S. pyogenes Cas9 enzyme may be substituted or inserted with the RuvC or RuvC-like domain, or fragment thereof, derived from another Cas9 enzyme, such as one from another species.

[0518] In some instances, the modification to the RuvC or RuvC-like domain can comprise insertion of the same or similar RuvC or RuvC-like domain in tandem (e.g., adjacent) to the RuvC or RuvC-like domain of Cas9. The RuvC or RuvC-like domain can be inserted N-terminal and/or C-terminal of the RuvC or RuvC-like domain in Cas9. Insertion of one or more RuvC or RuvC-like domains in Cas9 can be useful in extending specificity in a target nucleic acid. Insertion of one or more RuvC or RuvC-like domains in Cas9 can be useful in duplicating specificity in a target nucleic acid. For example, insertion of one or more RuvC or RuvC-like domains can configure Cas9 to recognize a longer stretch of target nucleic acid, recognize a different RNA-DNA hybrid, and/or recognize a target nucleic acid with higher binding affinity.

[0519] In some instances, a site-directed polypeptide comprises an amino acid sequence comprising at least 15% amino acid identity to a Cas9 from S. pyogenes, two nucleic acid-cleaving domains (i.e., a HNH domain and RuvC domain), and a modified RuvC domain.

### Modifications to Cas9 Domains Containing RNA Polymerase Homologous Regions

[0520] In some cases, a site-directed polypeptide may be share homology with RNA polymerase. Both proteins may share similar functionally homologous domains that are involved in catalysis of binding and manipulation of nucleic acids. For example, RNA polymerase can comprise regions of polypeptide sequence that is involved in binding RNA-DNA duplexes. In some cases, these regions may aid in melting the duplex.

[0521] In some cases, a site-directed polypeptide may also comprise certain regions that affect the binding specificity of the enzyme for nucleic acids. In some cases, these regions may share either sequence or functional homology with domains or regions as found in RNA polymerase. In some cases, the basic region of the N-terminus of the site-directed polypeptide may be bind to the tracrRNA and crRNA or a single RNA (sgRNA). In S. pyogenes, this may correspond to a region of residues 50-100.

[0522] Generally, the present disclosure provides for any suitable modification to this region or adjacent regions. In some cases, the tracrRNA/crRNA binding region (e.g., the nucleic acid-targeting nucleic acid binding region) in the site-directed polypeptide may be modified to alter specificity for the nucleic acid. In some cases, the tracrRNA/crRNA binding region may share homology with the tracrRNA/crRNA binding region identified in the Cas9 protein of S. pyogenes (residues 50-100). In some cases, the tracrRNA/crRNA binding region may share at least 5%, 10%, 15%, 20%, 25%, 30%, 35%, 40%, 45%, 50%, 55%, 60%, 65%, 70%, 75%, 80%, 85%, 90%, 95%, 98%, 99%, or 100% homology with residues 50-100 of S. pyogenes Cas9 tracrRNA/crRNA binding region. In some cases, the tracrRNA/crRNA binding region may share at most 5%, 10%, 15%, 20%, 25%, 30%, 35%, 40%, 45%, 50%, 55%, 60%, 65%, 70%, 75%, 80%, 85%, 90%, 95%, 98%, 99%, or 100% homology with residues 50-100 of S. pyogenes Cas9 tracrRNA/crRNA binding region.

[0523] In some cases, modifications to the tracrRNA/crRNA binding region may include but are not limited to individual amino acid modifications, as described herein. In some cases, modification to the tracrRNA/crRNA binding region may include but are not limited to insertions, deletions or substitution of individual amino acids, or polypeptides, such as other protein elements (e.g domains, structural motifs, proteins).

[0524] Modifications may include modifications to at least 1, 2, 3, 4, 5, 6, 7, 8, 9, 10, 11, 12, 13, 14, 15, 16, 17, 18, 19, 20 or more amino acids of the tracrRNA/crRNA binding region. Modifications may include modifications to at most 1, 2, 3, 4, 5, 6, 7, 8, 9, 10, 11, 12, 13, 14, 15, 16, 17, 18, 19, 20 or more amino acids of the tracrRNA/crRNA binding region. Modifications may also include at least 5%, 10%, 15%, 20%, 25%, 30%, 35%, 40%, 45%, 50%, 55%, 60%, 65%, 70%, 75%, 80%, 85%, 90%, 95%, 98%, 99%, or 100% of the tracrRNA/crRNA binding region. Modifications may also include at most 5%, 10%, 15%, 20%, 25%, 30%, 35%, 40%, 45%, 50%, 55%, 60%, 65%, 70%, 75%, 80%, 85%, 90%, 95%, 98%, 99%, or 100% of the tracrRNA/crRNA binding region.

[0525] In some cases, modifications to the site-directed polypeptide tracrRNA/crRNA binding region sequences may include particular polypeptide structural motifs, including but not limited to alpha helix, beta strand, beta sheet, 310-helix, pi-helix, polyproline I motif, polyproline II motif, polyproline III motif, beta turn, alpha-turn-alpha, or helix kinks or hinges.

[0526] For example, substitutions to the site-directed polypeptide tracrRNA/crRNA binding region may include substitution or addition with one or more proteins or fragments thereof. For example, the tracrRNA/crRNA binding region could be substituted with the RNA-binding domain from any of the known RNA-binding Type I, Type II, or Type III CRISPR system member. The tracrRNA/crRNA binding region could be substituted with the RNA-binding domain from any of the known RNA-binding member of the RAMP superfamily. The tracrRNA/crRNA binding region could be substituted with the RNA-binding domain from any of the known RNA-binding member of the Cas7, Cas6, Cas5 families. In one example, the tracr RNA requirement may be replaced with the requirement for a 5′ hairpin sequence with the spacer sequence placed downstream of the hairpin for DNA recognition.

[0527] In some cases, modifications to site-directed polypeptide tracrRNA/crRNA binding region sequences may include deletion of at least 1%, 5%, 10%, 15%, 20%, 25%, 30%, 35%, 40%, 45%, 50%, 55%, 60%, 65%, 70%, 75%, 80%, 85%, 90%, 95%, 98%, 99%, or 100% of the tracrRNA/crRNA binding region. In some cases, modifications to site-directed polypeptide tracrRNA/crRNA binding region sequences may include deletion of at most 1%, 5%, 10%, 15%, 20%, 25%, 30%, 35%, 40%, 45%, 50%, 55%, 60%, 65%, 70%, 75%, 80%, 85%, 90%, 95%, 98%, 99%, or 100% of the tracrRNA/crRNA binding region.

[0528] In some cases, modifications to site-directed polypeptide tracrRNA/crRNA binding region sequences may include addition or substitution of at least 1%, 5%, 10%, 15%, 20%, 25%, 30%, 35%, 40%, 45%, 50%, 55%, 60%, 65%, 70%, 75%, 80%, 85%, 90%, 95%, 98%, 99%, or 100% of a homologous Cas9 tracrRNA/crRNA binding region. In some cases, modifications to site-directed polypeptide tracrRNA/crRNA binding region sequences may include addition or substitution of at most 1%, 5%, 10%, 15%, 20%, 25%, 30%, 35%, 40%, 45%, 50%, 55%, 60%, 65%, 70%, 75%, 80%, 85%, 90%, 95%, 98%, 99%, or 100% of a homologous Cas9 tracrRNA/crRNA binding region.

[0529] Homologous site-directed polypeptide tracrRNA/crRNA binding regions may be derived from any suitable organism. In some cases, the tracrRNA/crRNA binding region may be derived from prokaryotic organisms, including but not limited to archea, bacteria, protists (e.g., E. coli, S. pyogenes, S. thermophilus, P. furiosus and etc.). For example, the tracrRNA/crRNA binding region of the S. pyogenes Cas9 may be substituted or inserted with the tracrRNA/crRNA binding region, or fragment thereof, derived from another Cas9, such as one derived from another species.

[0530] In some instances, a site-directed polypeptide comprises an amino acid sequence comprising at least 15% amino acid identity to a Cas9 from S. pyogenes, two nucleic acid-cleaving domains (i.e., a HNH domain and RuvC domain), and a modified polymerase-like domain.

### Modifications to Alter PAM Specificity

[0531] In some instances, a site-directed polypeptide can recognize a protospacer adjacent motif (PAM). A PAM can be any sequence in a target nucleic acid that is recognized by a site-directed polypeptide and is immediately 3′ of the target nucleic acid sequence targeted by the spacer of a nucleic acid-targeting nucleic acid. For example, a PAM can comprise 5′-NGG-3′ or 5′-NGGNG-3′, 5′-NNAAAAW-3′, 5′-NNNNGATT-3′, 5′-GNNNCNNA-3′, 5′-NNNACA-3′ where N is any nucleotide and N is immediately 3′ of the target nucleic acid sequence targeted by the spacer sequence.

[0532] A site-directed polypeptide can be modified to alter PAM specificity. For example, a site-directed polypeptide can be modified such that prior to the modifying the polypeptide targets a first protospacer adjacent motif and after the modifying the site-directed polypeptide targets a second protospacer adjacent motif. In some instances, altered PAM specificity can comprise a change in binding specificity (e.g., increased binding, decreased binding), and/or a change in the binding constant (e.g., increase Kd, decrease Kd).

[0533] A site-directed polypeptide can be modified such that the site-directed polypeptide can recognize a new type of PAM different from the type the wild-type site-directed polypeptide recognizes. For example, a site-directed polypeptide that recognizes the 5′-NGG-3′ PAM can be modified such that it can recognize the 5′-NGGNG-3′ PAM, 5′-NNAAAAW-3′, 5′-NNNNGATT-3′, 5′-GNNNCNNA-3′, or 5′-NNNACA-3′.

[0534] Any region of a site-directed polypeptide can be engineered (e.g., bridge helix, HNH and/or HNH-like domain, RuvC and/or RuvC-like domain, basic patch) to alter PAM specificity according to the methods of the disclosure.

[0535] Regions corresponding to residues 445-507, 446-497, 1096-1225, 1105-1138 of a wild-type site-directed polypeptide (e.g., Cas9 from S. pyogenes, SEQ ID NO: 8) can be engineered to modify PAM recognition. Engineering of these regions can comprise introducing mutations, replacing with corresponding regions from other Cas9 orthologues, deletions, insertions etc. Regions corresponding to residues 718-757, 22-49, 65-95, 445-507, 446-497, 1096-1225, 1105-1138 can be engineered to modify recognition of the nucleic-acid targeting nucleic acid. Regions corresponding to residues 445-507 and 1105-1138 can be engineered to modify P-domain recognition.

[0536] In some instances, a site-directed polypeptide comprises an amino acid sequence comprising at least 15% amino acid identity to a Cas9 from S. pyogenes, two nucleic acid-cleaving domains (i.e., a HNH domain and RuvC domain), and a modification, wherein prior to introduction of the modification the site-directed polypeptide is adapted to bind a first PAM and after introduction of the modification, the site-directed polypeptide is adapted to bind to a different PAM.

### Modifications to Alter Nucleic Acid-Targeting Nucleic Acid Specificity

[0537] In some instances, a site-directed polypeptide can recognize a nucleic acid-targeting nucleic acid. A site-directed polypeptide can be modified to alter a nucleic acid-targeting nucleic acid specificity. For example, a site-directed polypeptide can be modified such that prior to the modifying the polypeptide targets a first a nucleic acid-targeting nucleic acid and after the modifying the site-directed polypeptide targets a second a nucleic acid-targeting nucleic acid. In some instances, altered nucleic acid-targeting nucleic acid specificity can comprise a change in binding specificity (e.g., increased binding, decreased binding), and/or a change in the binding constant (e.g., increase Kd, decrease Kd).

[0538] A site-directed polypeptide can be modified such that the site-directed polypeptide can recognize a new type of a nucleic acid-targeting nucleic acid different from the type the wild-type site-directed polypeptide recognizes. Any region of a site-directed polypeptide can be engineered (e.g., bridge helix, HNH and/or HNH-like domain, RuvC and/or RuvC-like domain, basic patch) to alter PAM specificity according to the methods of the disclosure.

[0539] In some instances, a site-directed polypeptide comprises an amino acid sequence comprising at least 15% amino acid identity to a Cas9 from S. pyogenes, two nucleic acid-cleaving domains (i.e., a HNH domain and RuvC domain), and a modification, wherein prior to introduction of the modification the site-directed polypeptide is adapted to bind a first a nucleic acid-targeting nucleic acid and after introduction of the modification, the site-directed polypeptide is adapted to bind to a different a nucleic acid-targeting nucleic acid.

### Modifications to Alter Hybridization Requirements

### Insertions

[0540] A site-directed polypeptide can be modified to increase binding specificity to a target nucleic acid. A sequence may be inserted into the site-directed polypeptide. In some instances, a HNH and/or HNH-like domain may be inserted in a site-directed polypeptide. The non-native sequence (e.g., HNH and/or HNH-like domain) may originate from any species. The insertion may take place at any location in the site-directed polypeptide. The insertion may occur in tandem (e.g., adjacent) to the native HNH and/or HNH-like domain of the site-directed polypeptide. The inserted HNH and/or HNH-like domain may comprise a mutation. The inserted HNH and/or HNH-like domain may comprise a mutation that reduces the nuclease activity of the domain. In some instances, a RuvC and/or RuvC-like domain may be inserted in a site-directed polypeptide. The insertion may take place at any location in the site-directed polypeptide. The insertion may occur in tandem (e.g., adjacent) to the native RuvC and/or RuvC-like domain of the site-directed polypeptide. The inserted RuvC and/or RuvC-like domain may comprise a mutation. The inserted RuvC and/or RuvC-like domain may comprise a mutation that reduces the nuclease activity of the domain.

[0541] A site-directed polypeptide can be modified to increase binding specificity to a nucleic acid-targeting nucleic acid. A sequence may be inserted into the site-directed polypeptide. A HNH and/or HNH-like domain may be inserted in a site-directed polypeptide. The non-native sequence (e.g., HNH and/or HNH-like domain) may originate from any species. The insertion may take place at any location in the site-directed polypeptide. The insertion may occur in tandem (e.g., adjacent) to the native HNH and/or HNH-like domain of the site-directed polypeptide. The inserted HNH and/or HNH-like domain may comprise a mutation. The inserted HNH and/or HNH-like domain may comprise a mutation that reduces the nuclease activity of the domain. A RuvC and/or RuvC-like domain may be inserted in a site-directed polypeptide. The insertion may take place at any location in the site-directed polypeptide. The insertion may occur in tandem (e.g., adjacent) to the native RuvC and/or RuvC-like domain of the site-directed polypeptide. The inserted RuvC and/or RuvC-like domain may comprise a mutation. The inserted RuvC and/or RuvC-like domain may comprise a mutation that reduces the nuclease activity of the domain.

[0542] A site-directed polypeptide can be engineered to comprise a polypeptide domain that can bind to RNA-DNA hybrids (e.g., RNase domain, zinc finger domain). For example, a site-directed polypeptide can be engineered to comprise an RNascH domain. The inserted RNaseH domain may comprise a mutation. The inserted RNascH domain may comprise a mutation that reduces the nuclease activity of the domain.

[0543] A site-directed polypeptide can be engineered to comprise a polypeptide domain that can bind to double-stranded DNA (e.g., domains comprising helix-turn-helix motifs, domains comprising leucine zipper motifs, domains comprising helix-loop-helix motifs, domains comprising zinc finger motifs). For example, a site-directed polypeptide can be engineered to comprise a helix-turn-helix motif. Non-limiting exemplary helix-turn-helix motifs include those from dnaB, TetR, MuB, P2R, CysB, BirA, the bacteriophage lambda repressor, Engrailed, Myb, LuxR, MarR, ETS, ZNF10a, Kox-1. The helix-loop-helix motif can be di-helical, tri-helical, tetrahelical, a winged helix-turn-helix, or other modified helix-loop-helix. The inserted domain may comprise a mutation. The inserted domain may comprise a mutation that reduces the nuclease activity of the domain.

### Compensatory Mutations

[0544] A site-directed polypeptide can comprise a mutation and/or be engineered such that it may preferentially bind to a mutated and/or engineered nucleic acid-targeting nucleic acid. Such mutation of a site-directed polypeptide and nucleic acid-targeting nucleic acid pair can be referred to as a compensatory mutation. For example, a site-directed polypeptide can be engineered such that its nuclease domain (e.g., HNH and/or HNH-like, RuvC and/or RuvC-like) is replaced by a nucleic acid binding domain (e.g., Csy4, Cas5, Cas6 nucleic acid binding domain). A site-directed polypeptide can be engineered such that a nucleic acid binding domain (e.g., Csy4, Cas5, Cas6 nucleic acid binding domain) is inserted into the site-directed polypeptide. The resulting site-directed polypeptide can bind to a nucleic acid-targeting nucleic acid that is mutated and/or engineered to comprise a nucleic acid binding domain binding site (e.g., binding site for Csy4, Cas5, Cas6 nucleic acid binding domains). The nucleic acid-targeting nucleic acid can be mutated and/or engineered to comprise a nucleic acid-binding domain binding site in the minimum tracrRNA sequence. The nucleic acid-targeting nucleic acid can be mutated and/or engineered to comprise a nucleic acid binding domain binding site in the 3′ tracrRNA sequence. The nucleic acid-targeting nucleic acid can be mutated and/or engineered to comprise a nucleic acid binding domain binding site in the tracrRNA extension.

[0545] In some instances, a site-directed polypeptide comprises an amino acid sequence comprising at least 15% amino acid identity to a Cas9 from S. pyogenes, two nucleic acid-cleaving domains (i.e., a HNH domain and RuvC domain), and a compensatory mutation, in which the site-directed polypeptide is such that it can bind to an engineered nucleic acid-targeting nucleic acid but not an unmodified nucleic acid-targeting nucleic acid.

### Methods to Generate Sticky Ends and Blunt Cuts

[0546] In some instances, one or more nickases (i.e., site-directed polypeptides comprising one substantially inactive nuclease domain) can be used to generate targeted double-stranded cuts in target nucleic acid. Each nickase of the one or more nickases can target one strand of the double-stranded target nucleic acid. In some instances, two nickases can be used to generate a targeted double-stranded cut.

[0547] The two nickases can cut the target nucleic acid generating a blunt end cut (wherein the cut sites of the target nucleic acid are the same location on each strand). The two nickases can cut the target nucleic acid at different locations within each strand such that some single-stranded nucleotides remain, thereby generating a sticky end.

[0548] Cleavage of target nucleic acid by two modified site-directed polypeptides having nickase activity may be used to incur deletions or insertions of nucleic acid material from a target nucleic acid by cleaving the target nucleic acid and allowing the cell to repair the sequence in the absence of an exogenously provided donor polynucleotide. In some instances, the methods of the disclosure can be used to knock out a gene. If a nucleic acid-targeting nucleic acid and two modified site-directed polypeptides having nickase activity are co-administered to cells with a donor polynucleotide sequence that includes at least a segment with homology to the target nucleic acid, new nucleic acid material may be inserted/copied into the site. Such methods may be used to add, i.e. insert or replace, nucleic acid material to a target nucleic acid (e.g., to “knock in” a nucleic acid that encodes a protein, an siRNA, an miRNA, etc.), to add a tag (e.g., 6×His, a fluorescent protein (e.g., a green fluorescent protein; a yellow fluorescent protein, etc.), hemagglutinin (HA), FLAG, etc.), to add a regulatory sequence to a gene (e.g. promoter, polyadenylation signal, internal ribosome entry sequence (IRES), 2A peptide, start codon, stop codon, splice signal, localization signal, etc.), to modify a nucleic acid sequence (e.g., introduce a mutation), and the like.

[0549] FIG. 32 depicts a method for generating blunt ends by nickases. The target nucleic acid duplex 3210 can comprise a plurality of PAM sequences 3215 (boxed), wherein one PAM is on one strand of the target nucleic acid 3210 and one PAM is on the other strand of the target nucleic acid 3210. A nucleic acid-targeting nucleic acid 3205 as part of a complex with the nickase (nickase not shown) can hybridize to the spacer sequence adjacent to the PAM 3215 on each strand of the target nucleic acid 3210. The nickase can cleave one strand of the target nucleic acid 3210. Cleavage is indicated by the triangles. If the PAMs are appropriately spaced the nickases can cut the target nucleic acid in substantially the same place on each strand, thereby resulting in a blunt end. The PAM sequences may be separated by at least about 1, 2, 3, 4, 5, 6, 7, 8, 9, 10, 20, 30, 40, or 50 or more nucleotides. The PAM sequences may be separated by at most about 1, 2, 3, 4, 5, 6, 7, 8, 9, 10, 20, 30, 40, or 50 or more nucleotides. In some instances, the PAMs are spaced by 6 nucleotides (i.e., there are 6 nucleotides in between each PAM). In some instances, the nucleic acid-targeting nucleic acid cleaves about 3 nucleotides 5′ of the PAM.

[0550] In some embodiments, two or more nickases can be employed to generate sticky ends. FIG. 33 illustrates how two nickases targeted to overlapping regions on a target nucleic acid can result in a staggered double-stranded break resulting in sticky ends. The target nucleic acid duplex 3310 can comprise a plurality of PAM sequences 3315 (boxed). A nucleic acid-targeting nucleic acid 3305 as part of a complex with the nickase (nickase not shown) can hybridize to the spacer sequence adjacent to the PAM 3315 on each strand of the target nucleic acid 3310. The nickase can cleave one strand of the target nucleic acid 3310. Cleavage is indicated by the triangles. If the PAMs are appropriately spaced the nickases can cut the target nucleic acid in staggered locations, thereby resulting in a sticky end. The PAM sequences may be separated by at least about 1, 2, 3, 4, 5, 6, 7, 8, 9, or 10 or more nucleotides. The PAM sequences may be separated by at most about 1, 2, 3, 4, 5, 6, 7, 8, 9, or 10 or more nucleotides. The distance of the PAM sequences can be related to the length of the sticky end generated. For example, the farther the PAMs are away from each other, the longer the sticky end will be.

[0551] A method for generating sticky ends using two or more nickases can involve PAM sequences substantially adjacent to one another (though on opposite strands). In some instances, the PAM sequences are separated by at least about 1, 2, 3, 4, 5, 6, 7, 8, 9, or 10 or more nucleotides. In some instances, the PAM sequences are separated by at most about 1, 2, 3, 4, 5, 6, 7, 8, 9, or 10 or more nucleotides. In some instances, the PAM sequences are separated by one nucleotide. In some instances, the PAM sequences are separated by no nucleotides.

### Methods for Enrichment and Sequencing of Target Nucleic Acids

### General Overview

[0552] Sequencing can be useful for diagnosing disease by identifying mutations and/or other sequence variants (e.g., polymorphisms). The methods of the disclosure provide for methods, kits, and compositions for enriching a target nucleic acid sequence without the use of amplification methodologies. A target nucleic acid can be enriched with the use of a site-directed polypeptide and a nucleic acid-targeting nucleic acid.

[0553] FIG. 3 depicts an exemplary embodiment of the methods of the disclosure. A site-directed polypeptide 305 can bind a nucleic acid-targeting nucleic acid 310, thereby forming a complex 306. The nucleic acid-targeting nucleic acid 310 can comprise a nucleic acid affinity tag 311. The site-directed polypeptide 305 can comprise a nuclease domain. The site-directed polypeptide 305 can be enzymatically active. The site-directed polypeptide 305 can comprise an affinity tag 315. The nucleic acid-targeting nucleic acid 310 can hybridize to a target nucleic acid 320. In some embodiments, a plurality of complexes 306 can hybridize to a plurality of locations within a target nucleic acid 320. In a cleavage step 325, the nuclease domain of a site-directed polypeptide 305 can cleave, or cut 330 the target nucleic acid 320. The excised target nucleic acid 340 can be purified in a purification step 335. Adaptors 345 can be ligated to the excised target nucleic acid. The adaptors can facilitate sequencing of the excised target nucleic acid.

[0554] FIG. 4 depicts an exemplary embodiment of the methods of the disclosure. A site-directed polypeptide 405 can interact with a nucleic acid-targeting nucleic acid 410, thereby forming a complex 406. The site-directed polypeptide 405 can comprise a nuclease domain. In some embodiments, the nuclease domain of the site-directed polypeptide 405 can be enzymatically inactive. The site-directed polypeptide 405 can comprise an affinity tag 415. The nucleic acid-targeting nucleic acid 410 can hybridize to a target nucleic acid 420. The nucleic acid-targeting nucleic acid 410 can comprise a nucleic acid affinity tag 411. The affinity tag 411 of the nucleic acid-targeting nucleic acid can comprise a hairpin structure. A plurality of complexes 406 can hybridize to a plurality of locations within a target nucleic acid 420. In a fragmenting step 225, the target nucleic acid 420 can be fragmented into target nucleic acid fragment 445 (also herein referred to as a “target nucleic acid”). The site-directed polypeptide 405 can be purified by a capture agent 440 that can bind to the affinity tag 415 of the site-directed polypeptide 405. The fragmented target nucleic acid 445 can be eluted from the complex 406 in a purification step 450. In the same step, or optionally, in a different step, adaptors 455 can be ligated to the target nucleic acid. The adaptors can facilitate sequencing of the target nucleic acid.

### Complex of a Nucleic Acid-Targeting Nucleic Acid and a Site-Directed Polypeptide

[0555] A nucleic acid-targeting nucleic acid can interact with a site-directed polypeptide (e.g., a nucleic acid-guided nuclease, e.g. Cas9), thereby forming a complex. The nucleic acid-targeting nucleic acid can guide the site-directed polypeptide to a target nucleic acid.

[0556] In some embodiments, a nucleic acid-targeting nucleic acid can be engineered such that the complex (e.g., comprising a site-directed polypeptide and a nucleic acid-targeting nucleic acid) can bind outside of the cleavage site of the site-directed polypeptide. In this case, the target nucleic acid may not interact with the complex and the target nucleic acid can be excised (e.g., free from the complex).

[0557] In some embodiments, a nucleic acid-targeting nucleic acid can be engineered such that the complex can bind inside of the cleavage site of the site-directed polypeptide. In this case, the target nucleic acid can interact with the complex and the target nucleic acid can be bound (e.g., bound to the complex).

[0558] The nucleic acid-targeting nucleic acid can be engineered in such a way that the complex (e.g., comprising a site-directed polypeptide and/or a nucleic acid-targeting nucleic acid) can hybridize to a plurality of locations within a nucleic acid sample.

[0559] A plurality of complexes can be contacted to a nucleic acid sample. The plurality of complexes can comprise nucleic acid-targeting nucleic acids engineered to hybridize to the same sequence. The plurality of complexes can comprise nucleic acid-targeting nucleic acids engineered to hybridize to the different sequences.

[0560] The sequences can be at different locations within a target nucleic acid. The locations can comprise the same, or similar, target nucleic acid sequences. The locations can comprise different target nucleic acid sequences. The locations can be a defined distance from each other. The locations can be less than 10 kilobases (Kb) apart, less than 8 Kb apart, less than 6 Kb apart, less than 4 Kb apart, less than 2 Kb apart, less than 1 Kb apart, less than 900 nucleotides apart, less than 800 nucleotides apart, less than 700 nucleotides apart, less than 600 nucleotides apart, less than 500 nucleotides apart, less than 400 nucleotides apart, less than 300 nucleotides apart, less than 200 nucleotides apart, less than 100 nucleotides apart.

[0561] The complexes can cleave the target nucleic acid which can result in an excised target nucleic acid that can be less than 10 kilobases (Kb) long, less than 8 Kb long, less than 6 Kb long, less than 4 Kb long, less than 2 Kb long, less than 1 Kb long, less than 900 nucleotides long, less than 800 nucleotides long, less than 700 nucleotides long, less than 600 nucleotides long, less than 500 nucleotides long, less than 400 nucleotides long, less than 300 nucleotides long, less than 200 nucleotides long, less than 100 nucleotides long.

[0562] The complexes can be bound to a fragmented target nucleic acid that can be less than 10 kilobases (Kb) long, less than 8 Kb long, less than 6 Kb long, less than 4 Kb long, less than 2 Kb long, less than 1 Kb long, less than 900 nucleotides long, less than 800 nucleotides long, less than 700 nucleotides long, less than 600 nucleotides long, less than 500 nucleotides long, less than 400 nucleotides long, less than 300 nucleotides long, less than 200 nucleotides long, less than 100 nucleotides long.

### Methods for Detecting Off-Target Binding Sites of Site-Directed Polypeptides

### General Overview

[0563] This disclosure describes methods, compositions, systems, and/or kits for determining off target binding sites of site-directed polypeptides. In some embodiments of the disclosure a site-directed polypeptide can comprise a nucleic acid-targeting nucleic acid, thereby forming a complex. The complex can be contacted with a target nucleic acid. The target nucleic acid can be captured with capture agents that can bind to the affinity tags of the complex. The identity of the target nucleic acid can be determined through sequencing. Sequencing (e.g., high throughput sequencing, e.g., Illumina, Ion Torrent) can also identify the frequency of off-target binding sites of the site-directed polypeptide and/or complex, by counting the number of times a particular binding site is read. The methods, compositions, systems, and/or kits of the disclosure can facilitate the development of more accurately and specifically targeted site-directed polypeptides.

[0564] FIG. 5 depicts an exemplary embodiment of the methods of the disclosure. A site-directed polypeptide 505 can comprise an affinity tag 510. The site-directed polypeptide can comprise a nucleic acid-binding domain 515. The nucleic acid-binding domain 515 can be a nucleic acid. In some embodiments, the nucleic acid-binding domain 515, and the site-directed polypeptide 505 form a complex 531. The complex 531 can be contacted 525 with a target nucleic acid 530. In a preferred embodiment, the target nucleic acid 530 is DNA (e.g. genomic DNA or gDNA). The complex can be affinity purified 535 with a capture agent 540. The capture agent 540 can bind to the affinity tag 510 from the site-directed polypeptide 505. The capture agent 540 can comprise a second affinity tag 545. The capture agent 540 can be affinity purified 550 by binding to a solid support 555. In some embodiments, the solid support 555 is a bead coated with an affinity reagent that can bind to the affinity tag 545 of the capture agent. Optionally, the solid support 555 can bind to the affinity tag 510 of the site-directed polypeptide 505 to facilitate purification. In some embodiments, one or more rounds of purification can occur. Each round can comprise contacting a solid support 555 with the affinity tags of the site-directed polypeptide 510 and/or the capture agent 545. The affinity purified complex can be eluted from the target nucleic acid 530. The target nucleic acid can subsequently be prepared for further processing. Processing can include downstream analysis methods, e.g. sequencing.

[0565] FIG. 6 depicts an exemplary embodiment of the methods of the disclosure. A site-directed polypeptide 605 can comprise an affinity tag 610. The site-directed polypeptide 605 can comprise a nucleic acid-binding domain 615. The nucleic acid-binding domain 615 can be a nucleic acid. In some embodiments, the nucleic acid-binding domain 615 can comprise an affinity tag 620. In some embodiments, the nucleic acid-binding domain 615 and the site-specific polypeptide 605 can form a complex 631. The complex 631 may be contacted 625 with a target nucleic acid 630. In a preferred embodiment, the target nucleic acid 630 is DNA. The complex 631 can be affinity purified 635 with a capture agent 640. The capture agent 640 may be a conditionally enzymatically inactive site-directed polypeptide. The capture agent 640 can be a conditionally enzymatically inactive variant of Csy4. The capture agent 640 can bind to the affinity tag 620. The capture agent 640 can comprise an affinity tag 645. The capture agent 640 can be affinity purified 650 by binding to a solid support 655. In some embodiments, the solid support is a bead coated with an affinity reagent that can bind to the affinity tag 645 of the capture agent 640. Optionally, the solid support 655 can bind to the affinity tag 610 of the site-directed polypeptide 605 to facilitate purification. In some embodiments, two rounds of purification can occur, each comprising contacting a solid support 655 with the affinity tags of the site-directed polypeptide 610 and/or the capture agent 640. Cleavage of the affinity tag 620 can facilitate elution 660 of the target nucleic acid 630 from the solid support 655. The target nucleic acid 630 can subsequently be prepared for further downstream analysis methods such as sequencing.

### Methods

[0566] The disclosure provides methods for nuclease immunoprecipitation and sequencing (NIP-Seq). In some embodiments, the method can comprise a) contacting a nucleic acid sample with a complex comprising an enzymatically inactive site-directed polypeptide, a site-directed polypeptide, and a nucleic acid-targeting nucleic acid. The complex can hybridize to a target nucleic acid. The complex can be captured with a capture agent, and the target nucleic acid bound to the complex can be sequenced. In some embodiments, the method can further comprise determining the identity of the off-target binding site. The method can be performed using any of the site-directed polypeptides, nucleic acid-targeting nucleic acids, and complexes of site-directed polypeptides and nucleic acid-targeting nucleic acids as described herein.

[0567] The methods can be performed outside of a cell. For example, a sample can comprise purified genomic DNA, cell lysate, homogenized tissue, plasma, and the like. The methods can be performed in cells.

[0568] The site-directed polypeptide-target nucleic acid complexes can be fixed or cross-linked to form complexes. The cells can be crosslinked before they are lysed. Fixed or cross-linking cells can stabilize protein-DNA complexes in the cell. Suitable fixatives and cross-linkers can include, formaldehyde, glutaraldehyde, ethanol-based fixatives, methanol-based fixatives, acetone, acetic acid, osmium tetraoxide, potassium dichromate, chromic acid, potassium permanganate, mercurials, picrates, formalin, paraformaldehyde, amine-reactive NHS-ester crosslinkers such as bis[sulfosuccinimidyl]suberate (BS3), 3,3′-dithiobis[sulfosuccinimidylpropionate] (DTSSP), ethylene glycol bis[sulfosuccinimidylsuccinate (sulfo-EGS), disuccinimidyl glutarate (DSG), dithiobis[succinimidyl propionate] (DSP), disuccinimidyl suberate (DSS), ethylene glycol bis[succinimidylsuccinate] (EGS), NHS-ester/diazirine crosslinkers such as NHS-diazirine, NHS-LC-diazirine, NHS-SS-diazirine, sulfo-NHS-diazirine, sulfo-NHS-LC-diazirine, and sulfo-NHS-SS-diazirine.

[0569] The nucleic acid (e.g., genomic DNA) can be treated to fragment the DNA before affinity purification. Fragmentation can be performed through physical, mechanical or enzymatic methods. Physical fragmentation can include exposing a target polynucleotide to heat or to ultraviolet (UV) light. Mechanical disruption may be used to mechanically shear a target polynucleotide into fragments of the desired range. Mechanical shearing may be accomplished through a number of methods known in the art, including repetitive pipetting of the target polynucleotide, sonication and nebulization. Target polynucleotides may also be fragmented using enzymatic methods. In some cases, enzymatic digestion may be performed using enzymes such as using restriction enzymes. Restriction enzymes may be used to perform specific or non-specific fragmentation of target polynucleotides. The methods may use one or more types of restriction enzymes, generally described as Type I enzymes, Type II enzymes, and/or Type III enzymes. Type II and Type III enzymes are generally commercially available and well known in the art. Type II and Type III enzymes recognize specific sequences of nucleotide nucleotides within a double-stranded polynucleotide sequence (a “recognition sequence” or “recognition site”). Upon binding and recognition of these sequences, Type II and Type III enzymes cleave the polynucleotide sequence. In some cases, cleavage will result in a polynucleotide fragment with a portion of overhanging single-stranded DNA, called a “sticky end.” In other cases, cleavage will not result in a fragment with an overhang, creating a “blunt end.” The methods may comprise use of restriction enzymes that generate either sticky ends or blunt ends. Fragments of nucleic acids can also be generated via amplification techniques (e.g. polymerase chain reaction, long range polymerase chain reaction, linear polymerase chain reaction, and etc.).

[0570] Once fragmented, the complexes comprising the site-directed polypeptide can be purified by incubation with a solid support. For example, if the site-directed polypeptide comprises a biotin tag, the solid support can be coated with avidin or streptavidin to bind to the biotin tag.

[0571] In some embodiments, once fragmented, the complexes comprising the site-directed polypeptide, the target nucleic acid, and/or the nucleic acid-targeting nucleic acid are purified by incubation with a capture agent. A capture agent can refer to any agent that can bind to an affinity tag fused to the site-directed polypeptide. Exemplary capture agents can include, biotin, streptavidin, and antibodies. For example, if the affinity tag fused to the site-directed polypeptide is a FLAG tag, then the capture agent will be an anti-FLAG-tag antibody. In some embodiments, the capture agent can comprise an affinity tag (e.g., biotin, streptavidin).

[0572] In some instances, the capture agent is an enzymatically inactive endoribonuclease. For example, a capture agent can be an enzymatically inactive site-directed polypeptide, an enzymatically inactive Csy4, Cas5, or Cas6.

[0573] The capture agent can be purified with a solid support. For example, if the capture agent comprises a biotin tag, the bead can be coated with avidin or streptavidin to bind the biotinylated capture agent.

[0574] In some embodiments of the method, two or more rounds of purification can be performed. At least 1, 2, 3, 4, 5, 6, 7 or more rounds of purification can be performed. At most 1, 2, 3, 4, 5, 6, 7 or more rounds of purification can be performed. A first round of purification can comprise purification with a solid support that can bind to the affinity tag of the capture agent and a second round of purification can comprise purification with a solid support that can bind to the affinity tag of the site-directed polypeptide. A first round of purification can comprise purification with a solid support that can bind to the affinity tag of the site-directed polypeptide and a second round of purification can comprise purification with a solid support that will bind to the affinity tag of the capture agent. The method can be used to optimize the binding specificity of a site-directed polypeptide by performing the method more than once.

[0575] The captured complex can comprise site-directed polypeptide and a target nucleic acid. The target nucleic acid can be eluted from the site-directed polypeptide complex by methods such as high salt washing, ethanol precipitation, boiling, and gel purification.

[0576] The eluted DNA can be prepared for sequencing analysis (e.g., shearing, ligation of adaptors). Preparation for sequencing analysis can include the generation of sequencing libraries of the eluted target nucleic acid. Sequencing analysis can determine the identity and frequency of off-target binding sites of site-directed polypeptides. Sequence determination will also be performed using methods that determine many (typically thousands to billions) nucleic acid sequences in an intrinsically parallel manner, where many sequences are read out preferably in parallel using a high throughput serial process. Such methods include but are not limited to pyrosequencing (for example, as commercialized by 454 Life Sciences, Inc., Branford, Conn.); sequencing by ligation (for example, as commercialized in the SOLiD™ technology, Life Technology, Inc., Carlsbad, Calif.); sequencing by synthesis using modified nucleotides (such as commercialized in TruSeq™ and HiSeq™ technology by Illumina, Inc., San Diego, Calif., HeliScope™ by Helicos Biosciences Corporation, Cambridge, Mass., and PacBio RS by Pacific Biosciences of California, Inc., Menlo Park, Calif.), sequencing by ion detection technologies (Ion Torrent, Inc., South San Francisco, Calif.); sequencing of DNA nanoballs (Complete Genomics, Inc., Mountain View, Calif.); nanopore-based sequencing technologies (for example, as developed by Oxford Nanopore Technologies, LTD, Oxford, UK), and other known highly parallelized sequencing methods.

[0577] In some embodiments, the method further comprises collecting data and storing data. The data can be machine readable and can be stored and/or collected on a computer server (e.g. FIG. 31 and Example 27).

### Methods for Detecting Sequence Variants in Nucleic Acids

### General Overview

[0578] In some embodiments, the methods of the disclosure provide for detecting sequence variants in nucleic acids. The method can be performed using any of the site-directed polypeptides, nucleic acid-targeting nucleic acids, and complexes of site-directed polypeptides and nucleic acid-targeting nucleic acids as described herein. As depicted in FIG. 7, a nucleic acid sample 705 can be ligated 720 with a nucleic acid tag 710. The nucleic acid tag can be a single guide RNA. The nucleic acid tag can comprise a crRNA. The nucleic acid tag can comprise a detectable label 715. Together, the nucleic acid sample 705 ligated to the nuclei acid tag 710 can be referred to as a tagged test sample 721. The tagged test sample 721 can be contacted 725 to an array 740 comprising immobilized oligonucleotides 735. The immobilized oligonucleotides 735 can be referred to as a nucleic acid library. The oligonucleotides 735 can be double-stranded DNA. The oligonucleotides 735 can comprise a detectable label 730. The individual members of the tagged test sample 721 can hybridize 745 to the oligonucleotides 735 to which they share enough complementarity to facilitate hybridization. The amount of hybridization can be quantified by comparing the intensities of the two detectable labels 715 and 730. For example, hybridized oligonucleotides can display two detectable labels. Unhybridized oligonucleotides can display one detectable label 730. The hybridized sample can be contacted with a site-directed polypeptide 750. The site-directed polypeptide can cleave 755 the oligonucleotides 735 in the array 740 that have hybridized with members of the tagged test sample 721. Cleavage by the site-directed polypeptide can allow the hybridized members of the tagged test sample 721 to be removed. After cleavage by the site-directed polypeptide 750, only unhybridized oligonucleotide detectable labels 760 will remain on the array. The remaining detectable label 760 can be quantified. The quantification of the remaining detectable labels 760 can be correlated to which sequences were represented in the nucleic acid sample 705 and which were not. Oligonucleotides that do not display a remaining detectable label 760 correspond to sequences that were represented in the nucleic acid sample 705. Oligonucleotides that display a remaining detectable label 760 correspond to sequences that were not represented in the nucleic acid sample 705.

[0579] In some embodiments, a nucleic acid sample 805 can be ligated 820 with a nucleic acid tag 810. The nucleic acid tag can be a single guide RNA. The nucleic acid tag can comprise a crRNA. The nucleic acid tag can comprise a detectable label 815. Together, the nucleic acid sample ligated to the nuclei acid tag can be referred to as a tagged test sample 821. The tagged test sample 821 can be contacted 825 to an array 840 comprising immobilized oligonucleotides 835. The immobilized oligonucleotides can be referred to as a nucleic acid library. The oligonucleotides 835 can be double-stranded DNA. The individual members of the tagged test sample 821 can hybridize 845 to the oligonucleotides 835 to which they share enough complementarity to facilitate hybridization. The hybridized sample can be contacted with a site-directed polypeptide 850. The site-directed polypeptide can cleave 855 the oligonucleotides 835 in the array 840 that have hybridized with members of the tagged test sample 821. Cleavage by the site-directed polypeptide 850 can allow the hybridized members of the tagged test sample 821 to be removed. Cleavage by the site-directed polypeptide 850 can allow a portion of the immobilized olignucleotide to be cleaved and separated from the array 860. The separated cleaved oligonucleotides 860 can be ligated 865 to appropriate adaptors 870 for sequencing. Sequencing of the cleaved oligonucleotides 860 can determine the sequences represented in the nucleic acid sample 805.

[0580] In some embodiments, a nucleic acid library can be generated for sequencing analysis using commercially available high throughput sequencing platforms. The library can comprise nucleic acids that can comprise one or more sequencing tags 930 and a target sequence 945. The target sequence 945 can be a sequence that may be represented in a nucleic acid sample 905. A target sequence 945 can comprise a protospacer adjacent motif (PAM) sequence. Optionally, nucleic acids in a nucleic acid library can comprise one or more identifying polynucleotide sequences 935, and one or more extension sequences 940. In this embodiment, a nucleic acid sample 905 can be ligated 920 with a nucleic acid tag 910. The nucleic acid tag can be a single guide RNA. The nucleic acid tag can comprise a crRNA. Optionally, the nucleic acid tag can comprise an affinity tag 915. Together, the nucleic acid sample ligated to the nuclei acid tag can be referred to as a tagged test sample 921. The tagged test sample 921 can be contacted 925 to a nucleic acid library. The tagged test sample 921 can hybridize to a nucleic acid in the nucleic acid library, forming a complex 946. The hybridized tagged test sample and nucleic acid library can be contacted with a site-directed polypeptide 950. The site-directed polypeptide 950 can cleave the hybridized nucleic acid library members. The cleaved nucleic acid library members 965 can be separated from the uncleaved members. The uncleaved members can be subjected to sequencing analysis. Sequencing analysis can determine which sequences were represented in the nucleic acid sample 905. For example, the sequences of the uncleaved members can correspond to sequences that were not represented in the nucleic acid sample 905. These sequences can be removed from the known sequences in the nucleic acid library. The resulting sequences can be the sequences of the cleaved members 965 of the nucleic acid library which can correspond to sequences that were represented in the nucleic acid sample 905.

[0581] The site-directed polypeptide 950 can comprise an affinity tag 955. Optionally, the site-directed polypeptide 950 can be an enzymatically inactive variant of a site-directed polypeptide. In some embodiments, an enzymatically inactive site-directed polypeptide can be contacted to a hybridized nucleic acid library (e.g., complex 946). The site-directed polypeptide can bind but cannot cleave the hybridized nucleic acid library members. The site-directed polypeptide can be affinity purified 970 with a capture agent 975 that can bind to the affinity tag 955. Optionally, the complex 946 can be affinity purified with a capture agent that can bind to the affinity tag 915. The affinity purified nucleic acid library members can be subjected to sequencing analysis. In this embodiment, the sequenced nucleic acid library members can correspond to sequences that are represented in the nucleic acid sample 905.

### Sequencing

[0582] Methods for detecting sequence variants can comprise sequencing the variants. Sequence determination can be performed using methods that determine many (typically thousands to billions) nucleic acid sequences in an intrinsically parallel manner, where many sequences are read out preferably in parallel using a high throughput serial process. Such methods can include but are not limited to pyrosequencing (for example, as commercialized by 454 Life Sciences, Inc., Branford, Conn.); sequencing by ligation (for example, as commercialized in the SOLiD™ technology, Life Technology, Inc., Carlsbad, Calif.); sequencing by synthesis using modified nucleotides (such as commercialized in TruSeq™ and HiSeq™ technology by Illumina, Inc., San Diego, Calif., HeliScope™ by Helicos Biosciences Corporation, Cambridge, Mass., and PacBio RS by Pacific Biosciences of California, Inc., Menlo Park, Calif.), sequencing by ion detection technologies (Ion Torrent, Inc., South San Francisco, Calif.); sequencing of DNA nanoballs (Complete Genomics, Inc., Mountain View, Calif.); nanopore-based sequencing technologies (for example, as developed by Oxford Nanopore Technologies, LTD, Oxford, UK), capillary sequencing (e.g, such as commercialized in MegaBACE by Molecular Dynamics), electronic sequencing, single molecule sequencing (e.g., such as commercialized in SMRT™ technology by Pacific Biosciences, Menlo Park, Calif.), droplet microfluidic sequencing, sequencing by hybridization (such as commercialized by Affymetrix, Santa Clara, Calif), bisulfate sequencing, and other known highly parallelized sequencing methods.

### Real Time PCR

[0583] Methods for detecting sequence variants can comprise detecting the variants using real time PCR. Sequence determination can be performed by real time polymerase chain reaction (RT-PCR, also referred to as quantitative-PCR (QPCR)) can detect an amount of amplifiable nucleic acid present in a sample. QPCR is a technique based on the polymerase chain reaction, and can be used to amplify and simultaneously quantify a target nucleic acid. QPCR can allow for both detection and quantification of a specific sequence in a target nucleic acid sample. The procedure can follow the general principle of polymerase chain reaction, with the additional feature that the amplified target nucleic acid can be quantified as it accumulates in the reaction in real time after each amplification cycle. Two methods of quantification can be: (1) use of fluorescent dyes that intercalate with double-stranded target nucleic acid, and (2) modified DNA oligonucleotide probes that fluoresce when hybridized with a complementary target nucleic acid. In the first method, a target nucleic acid-binding dye can bind to all double-stranded (ds) nucleic acid in PCR, resulting in fluorescence of the dye. An increase in nucleic acid product during PCR therefore can lead to an increase in fluorescence intensity and can be measured at each cycle, thus allowing nucleic acid concentrations to be quantified. The reaction can be prepared similarly to a standard PCR reaction, with the addition of fluorescent (ds) nucleic acid dye. The reaction can be run in a thermocycler, and after each cycle, the levels of fluorescence can be measured with a detector; the dye can only fluoresce when bound to the (ds) nucleic acid (i.e., the PCR product). With reference to a standard dilution, the (ds) nucleic acid concentration in the PCR can be determined. The values obtained can not have absolute units associated with it. A comparison of a measured DNA/RNA sample to a standard dilution can give a fraction or ratio of the sample relative to the standard, allowing relative comparisons between different tissues or experimental conditions. To ensure accuracy in the quantification, the expression of a target gene can be normalized to a stably expressed gene. This can allow for correction of possible differences in nucleic acid quantity or quality across samples. The second method can use a sequence-specific RNA or DNA-based probe to quantify only the nucleic acid containing the probe sequence; therefore, use of the reporter probe can increase specificity, and can allow quantification even in the presence of some non-specific nucleic acid amplification. This can allow for multiplexing, (i.e., assaying for several genes in the same reaction by using specific probes with differently colored labels), provided that all genes are amplified with similar efficiency. This method can be carried out with a nucleic acid-based probe with a fluorescent reporter (e.g. 6-carboxyfluorescein) at one end and a quencher (e.g., 6-carboxy-tetramethylrhodamine) of fluorescence at the opposite end of the probe. The close proximity of the reporter to the quencher can prevent detection of its fluorescence. Breakdown of the probe by the 5′ to 3′ exonuclease activity of a polymerase (e.g., Taq polymerase) can break the reporter-quencher proximity and thus can allow unquenched emission of fluorescence, which can be detected. An increase in the product targeted by the reporter probe at each PCR cycle can result in a proportional increase in fluorescence due to breakdown of the probe and release of the reporter

[0584] The reaction can be prepared similarly to a standard PCR reaction, and the reporter probe can be added. As the reaction commences, during the annealing stage of the PCR both probe and primers can anneal to the target nucleic acid. Polymerization of a new DNA strand can be initiated from the primers, and once the polymerase reaches the probe, its 5′-3′-exonuclease can degrade the probe, physically separating the fluorescent reporter from the quencher, resulting in an increase in fluorescence. Fluorescence can be detected and measured in a real-time PCR thermocycler, and geometric increase of fluorescence can correspond to exponential increase of the product is used to determine the threshold cycle in each reaction. Relative concentrations of DNA present during the exponential phase of the reaction can be determined by plotting fluorescence against cycle number on a logarithmic scale (so an exponentially increasing quantity can give a straight line). A threshold for detection of fluorescence above background can be determined. The cycle at which the fluorescence from a sample crosses the threshold can be called the cycle threshold, Ct. Since the quantity of DNA can double every cycle during the exponential phase, relative amounts of DNA can be calculated, (e.g. a sample with a Ct of 3 cycles earlier than another has 23=8 times more template). Amounts of nucleic acid (e.g., RNA or DNA) can be determined by comparing the results to a standard curve produced by a real-time PCR of serial dilutions (e.g. undiluted, 1:4, 1:16, 1:64) of a known amount of nucleic acid. The QPCR reaction can involve a dual fluorophore approach that takes advantage of fluorescence resonance energy transfer (FRET), (e.g., LIGHTCYCLER hybridization probes, where two oligonucleotide probes can anneal to the amplicon). The oligonucleotides can be designed to hybridize in a head-to-tail orientation with the fluorophores separated at a distance that is compatible with efficient energy transfer. Other examples of labeled oligonucleotides that are structured to emit a signal when bound to a nucleic acid or incorporated into an extension product include: SCORPIONS probes, Sunrise (or AMPLIFLOUR) primers, and LUX primers and MOLECULAR BEACONS probes. The QPCR reaction can use fluorescent Taqman methodology and an instrument capable of measuring fluorescence in real time (e.g., ABI Prism 7700 Sequence Detector). The Taqman reaction can use a hybridization probe labeled with two different fluorescent dyes. One dye can be a reporter dye (6-carboxyfluorescein), the other can be a quenching dye (6-carboxy-tetramethylrhodamine). When the probe is intact, fluorescent energy transfer can occur and the reporter dye fluorescent emission can be absorbed by the quenching dye. During the extension phase of the PCR cycle, the fluorescent hybridization probe can be cleaved by the 5′-3′ nucleolytic activity of the DNA polymerase. On cleavage of the probe, the reporter dye emission can no longer transferred efficiently to the quenching dye, resulting in an increase of the reporter dye fluorescent emission spectra. Any nucleic acid quantification method, including real-time methods or single-point detection methods can be use to quantify the amount of nucleic acid in the sample. The detection can be performed several different methodologies (e.g., staining, hybridization with a labeled probe; incorporation of biotinylated primers followed by avidin-enzyme conjugate detection; incorporation of 32P-labeled deoxynucleotide triphosphates, such as dCTP or dATP, into the amplified segment. The quantification can or can not include an amplification step. The quantitation can not be experimental.

### Microarray

[0585] Methods for detecting sequence variants can comprise sequencing and/or detecting the variants using a microarray. Microarrays can be used for determining the expression level of a plurality of genes in a nucleic acid sample. Microarrays can be used for determining sequence identity of a plurality of sequences in a nucleic acid sample.

[0586] A microarray can comprise a substrate. Substrates can include, but are not limited to, glass and modified or functionalized glass, plastics (including acrylics, polystyrene and copolymers of styrene and other materials, polypropylene, polyethylene, polybutylene, polyurethanes, Teflon™, and the like), polysaccharides, nylon or nitrocellulose, resins, silica or silica-based materials including silicon and modified silicon, carbon, metals, inorganic glasses, and plastics.

[0587] Microarrays can comprise a plurality of polynucleotide probes. A microarray can comprise about 1, 10, 100, 1000, 5000, 10000, 20000, 30000, 40000, 50000, 60000, 70000, 80000, 90000, 100000, 110000, 120000 or more probes.

[0588] Probes can be can be at least 10, 20, 30, 40, 50, 60, 70, 80, 90, 100, 110, 120, 130, 140 nucleotides or more in length.

[0589] In some embodiments, probes can comprise sequence information for a specific set of genes and/or species. A probe can be complementary to a nucleic acid sequence encoding a host protein. A probe can be complementary to a non-coding nucleic acid sequence. A probe can be complementary to a DNA sequence. A probe can be complementary to an RNA sequence.

[0590] Probes can be immobilized on a microarray. The immobilization of polynucleotides on a solid substrate can be achieved by direct synthesis (e.g., photolithographic synthesis) of polynucleotides on a solid substrate or by immobilization (spotting) of previously synthesized polynucleotides on predetermined regions of a solid substrate. Polynucleotides can be immobilized on a microarray substrate by activating a surface of a solid substrate with a nucleophilic functional group (e.g., an amino group), coupling biomolecules (e.g., polynucleotides) activated with a good leaving group to the surface-activated solid substrate, and removing unreacted reactants. Probes can be immobilized to a bead further conjugated through a covalent or ionic attachment to a solid support. Probes can be immobilized onto a substrate using a specific film having a low conductivity and a low melting temperature, namely a gold film. An applied electromagnetic radiation can melt and can ablate the film at the impingement site. The film can be in contact with a colloidal dispersion and upon melting can generate a convective flow at the reaction site, thereby leading to adhering of an insoluble particle in the dispersion to the specifically melted site.

[0591] A microarray can analyze a nucleic acid sample comprising nucleic acids of unknown identity (e.g., test sample) by comparing the nucleic acid sample of unknown identity with a reference sample. A nucleic acid sample can be prepared from DNA (e.g., isolated DNA, genomic DNA, extrachromasomal DNA). A nucleic acid sample can be prepared from RNA. RNA can be reverse transcribed into DNA with a gene-specific primer or a universal primer. The reverse transcribed DNA (e.g., cDNA), can be treated with Rnase or base (e.g., NaOH) to hydrolyze the RNA. The cDNA can be labelled with a dye (e.g, Cy3, Cy5) with N-hydroxysuccinimide chemistry or similar labeling chemistries. Suitable fluorescent dyes can include a variety of commercial dyes and dye derivatives such as those that are denoted Alexa, Fluorescein, Rhodamine, FAM, TAMRA, Joe, ROX, Texas Red, BODIPY, FITC, Oregon Green, Lissamine and others. The reference sample can be labeled with a different dye than the test sample.

[0592] The test sample and the reference sample can be applied to a microarray to contact multiple spots simultaneously. The test sample and the reference sample can be applied to the microarray under hybridizing conditions that can allow the nucleic acids in the nucleic acid sample to bind to a complement probe on the microarray. Various reaction steps can be performed with the bound molecules in the microarray, including exposure of bound reactant molecules to washing steps. The progress or outcome of the reaction can be monitored at each spot (e.g., probe) in the microarray in order to characterize the nucleic acid sample immobilized on the chip. Microarray analysis usually can require an incubation period that can range from minutes to hours. The duration of the incubation period can be assay dependent and can be determined by a variety of factors, such as the type of reactant, degree of mixing, sample volume, target copy number, and density of the array. During the incubation period, nucleic acids in the nucleic acid sample can be in intimate contact with the microarray probes.

[0593] Detection can be performed using a confocal scanning instrument with laser excitation and photomultiplier tube detection, such as the ScanArray 3000 provided by GSI Lumonics (Billerica, MA). Confocal and non-confocal fluorescent detection systems can be used to implement the method such as those provided by Axon Instruments (Foster City, CA), Genetic MicroSystems (Santa Clara, CA), Molecular Dynamics (Sunnyvale, CA) and Virtek (Woburn, MA). Alternative detection systems can include scanning systems that use gas, diode and solid state lasers as well as those that use a variety of other types of illumination sources such as xenon and halogen bulbs. In addition to photomultiplier tubes, detectors can include cameras that use charge coupled device (CCD) and complementary metal oxide silicon (CMOS) chips.

[0594] The ratio of the intensities of the two dyes from the test sample and the reference sample can be compared for each probe. The strength of the signal detected from a given microarray spot can be directly proportional to the degree of hybridization of a nucleic acid in the sample to the probe at a given spot (e.g., a spot comprises a probe). Analysis of the fluorescence intensities of hybridized microarrays can include spot segmentation, background determination (and possible subtraction), elimination of bad spots, followed by a method of normalization to correct for any remaining noise. Normalization techniques can include global normalization on all spots or a subset of the spots such as housekeeping genes, prelog shifting to obtain better baseline matches, or in the case of two (or more) channel hybridizations finding the best fit that helps to give an M vs. A plot that is centered about M=0 and/or that helps to give a log (Red) vs. log (Green) plot that is centered about the diagonal with the smallest spread. The M vs. A plot can also be referred to as the R vs. I plot, where R is a ratio, such as R=log₂(Red/Green) and I is an intensity, such as I=log VRed*Green. Scaling, shifting, best fits through scatter plots, etc. can be techniques utilized to normalize microarray datasets and to give better footing for subsequent analysis. Most of these normalization methods can have some underlying hypothesis behind them (such as “most genes within the study do not vary much”).

### Tagged Nucleic Acids and Methods of Use

### General Overview

[0595] The disclosure provides for kits, methods, and compositions for tagged nucleic acid-targeting nucleic acids, as described herein. FIG. 10 depicts an exemplary embodiment of nucleic acid-targeting nucleic acid 1005 of the disclosure. A nucleic acid-targeting nucleic acid can comprise one or more non-native sequences (e.g., tags) 1010/1015. A nucleic acid-targeting nucleic acid can comprise a non-native sequence 1010/1015 at either the 3′ end, the 5′ end, or both the 3′ and 5′ end of the nucleic acid-targeting nucleic acid.

[0596] In some instances, a nucleic acid-targeting nucleic acid can be nucleic acid-targeting nucleic acids as described herein, and comprise one or more non-native sequences, such as either at the 3′end, the 5′end or both the 3′ and 5′ ends of the nucleic acid-targeting nucleic acid.

[0597] In some instances, the nucleic acid-targeting nucleic acid is a double-guide nucleic acid-targeting nucleic acid as described herein, and as depicted in FIG. 11. A double-guide nucleic acid-targeting nucleic acid can comprise two nucleic acid molecules 1105/1110. A double-guide nucleic acid-targeting nucleic acid can comprise a plurality of non-native sequences 1115/1120/1125/1130. The non-native sequence can be located at the 3′end, 5′ end or both 3′ and 5′ ends of each molecule of the nucleic acid-targeting nucleic acid. For example, the non-native sequence can be located at the 3′end, 5′ end or both 3′ and 5′ ends of the first nucleic acid molecule 1105. The non-native sequence can be located at the 3′end, 5′ end or both 3′ and 5′ ends of the second molecule 1110. A nucleic acid-targeting nucleic acid can comprise one or more non-native sequences in any of the enumerated configurations in FIG. 11.

[0598] The disclosure provides for methods of use of tagged nucleic acid-targeting nucleic acids. The method can be performed using any of the site-directed polypeptides, nucleic acid-targeting nucleic acids, and complexes of site-directed polypeptides and nucleic acid-targeting nucleic acids as described herein. In some instances, a plurality of tagged nucleic acid-targeting nucleic acids can be contacted to a plurality of target nucleic acids. FIG. 12 depicts an exemplary method of use for tagged nucleic acid-targeting nucleic acids. A tagged nucleic acid-targeting nucleic acid can comprise a spacer 1210 that can hybridize with a target nucleic acid 1205. The nucleic acid-targeting nucleic acid can comprise a non-native sequence (e.g., tag) 1220. The non-native sequence 1220 can be an RNA-binding protein binding sequence. In some instances, the non-native sequence 1220 can be a CRISPR RNA-binding protein binding sequence. The non-native sequence 1220 can be bound by a RNA-binding protein 1215. The RNA-binding protein 1215 can comprise a non-native sequence 1225 (e.g., a fusion, i.e., the RNA-binding protein 1215 can be a fusion polypeptide). The non-native sequence (e.g., fusion) 1225 can alter the transcription of the target nucleic acid and/or an exogenous nucleic acid. The non-native sequence (e.g., fusion) 1225 can comprise a first portion of a split system.

[0599] In some embodiments, a second nucleic acid-targeting nucleic acid, comprising a second spacer 1240 that can hybridize to a second target nucleic acid 1245, can comprise a second non-native sequence (e.g., tag) 1250. The second non-native sequence (e.g., tag) 1250 can be an RNA-binding protein binding sequence. The second non-native sequence (e.g., tag) 1250 can be a CRISPR RNA-binding protein binding sequence. The second non-native sequence 1250 can be bound by a RNA-binding protein 1235. The RNA-binding protein can comprise a non-native sequence 1230 (e.g., fusion, i.e., the RNA-binding protein 1235 can be a fusion). The non-native sequence 1230 (e.g., fusion) can be a second portion of a split system.

[0600] In some instances, the first portion of the split system 1225 and the second portion of the split system 1230 can be close together in space, such that the first portion of the split system 1225 and the second portion of the split system 1230 interact 1255 to form an active split system 1260. An active split system 1260 can refer to an unsplit system, wherein the first portion and the second portion form a whole piece of the split system. Activation of the split system can indicate that two target nucleic acids 1205/1245 are close together in space.

### Methods

[0601] The disclosure provides for methods for contacting a target nucleic acid with a complex comprising a site-directed polypeptide and a nucleic acid-targeting nucleic acid, and introducing one or more effector proteins, wherein the one or more effector proteins comprises a non-native sequence and can bind to the modified nucleic acid-targeting nucleic acid. An effector protein can refer to any protein with a functional effect. For example, an effector protein can comprise enzymatic activity, remodel biological molecules (e.g., folding chaperones), be a scaffolding protein, and/or bind a small molecule or metabolite. The effector protein can modify the target nucleic acid (e.g., cleavage, enzymatic modification, transcriptional modification). The methods of the disclosure provide for using the compositions of the disclosure as biosensors. For example, the complexes (e.g., comprising a modified nucleic acid-targeting nucleic acid, a site-directed polypeptide and/or an effector protein) can be used to monitor genetic mobility events, sense when sequences are close together in three-dimensional space, and conditionally alter transcription.

### Genetic Mobility Event

[0602] The disclosure provides for methods for determining the occurrence of a genetic mobility event. The method can be performed using any of the site-directed polypeptides, nucleic acid-targeting nucleic acids, and complexes of site-directed polypeptides and nucleic acid-targeting nucleic acids as described herein. A genetic mobility event can comprise, for example, a translocation, a recombination, an integration, a transposition, a horizontal gene transfer event, a transformation, a transduction, a conjugation, a gene conversion event, a duplication, a translocation, an inversion, a deletion, a substitution, or any combination thereof.

[0603] A genetic mobility event can comprise a recombination between genes. The recombination can lead to deleterious gene products (e.g., the BCR-ABL recombination which can contribute to breast cancer). Recombination can include, for example, homologous recombination, non-homologous recombination (e.g., non-homologous end joining), and V (D) J recombination. Recombination can refer to chromosomal crossover. Recombination can occur during prophase I of meiosis (e.g., synapsis). Recombination can comprise double-stranded breakage of nucleic acid strands of DNA, followed by formation of a holliday junction by recombinases which can catalyze swapping of the DNA strands.

[0604] Genetic mobility events can cause disease. For example, chronic myelogenous leukemia can result from a genetic mobility event. Translocation between chromosome 9 and 22 can result in a fusion BCR-Abl1 gene, which can result in the lengthening of one chromosome (e.g., 9), and the shortening of another chromosome (e.g., 22, i.e., Philadelphia chromosome). The BCR-Abl1 translocation can lead to the production of a BCR-Ab1 fusion protein which can interact with receptors (e.g., interleukin-3 receptor) to promote cell division, leading to chronic myelogenous leukemia (CML). Other non-limiting exemplary genetic mobility events include BRD3-NUT, BRD4-NUT, KIAA1549-BRAF, FIG/GOPC-ROS1, ETV6-NTRK3, BCAS4-BCAS3, TBLIXRI-RGS17, ODZ4-NRG1, MALATI-TFEB, APSCR1-TFE3, PRCC-TFE3, CLTC-TFE3, NONO-TFE3, SFPQ-TFE3, ETV6-NRTK3, EML4-ALK, EWSR1-ATF1, MN1-ETV6, CTNNBI-PLAG1, LIFR-PLAG1, TCEA1-PLAG1, FGFr1-PLAG1, CHCHD7-PLAG1, HMGA2-FHIT, HMGA-NFIB, CRTC1-MAMI2, CRCT3-MAML2, EWSR1-POUF5F1, TMPRSS1-ERG, TMPRSS2-ETV4, TMPRSS2-ETV5, HNRNPA2B1-ETV1, HERV-K-ETV1, C15ORF21-ETV1, SLC45A3-ETV1, SLC45A3-ETV5, SLC45A3-ELK4, KLK2-ETV4, CANT1-ETV4, RET-PTC1/CCDC6, RET-PTC2/PRKARIA, RET-PTC3,4/NCOA4, RET-PTC5/GOLGA5, RET-PTC6/TRIM24, RET-PTC7/TRIM33, RET-PTC8/KTN1, RET-PTC9/RFG9, RET-PTCM1, TFG-NTRK1, TPM3-NRTK1, TPR-NRTK1, RET-D10S170, ELKS-RET, HOOKS3-RET, RFP-RET, AKAP9-BRAF, and PAX8-PPARG.

[0605] Diseases that can be caused by genetic mobility events can include Charcot-Marie-Tooth disease type 1A (CMTIA), juvenile nephronophtisis (NPH), X-linked icthyosis, familial growth hormone deficiency type 1A, fascioscapulohumeral muscular dystrophy (FSHD), a-thalassemia, hemophilia A, Hunter syndrome (i.e., mucopolysaccharidosis II), Emery-Dreifuss musclar dystrophy, Hemoglobin Lepore, steroid 21-hydroxylase deficiency, glucocorticoid-suppressible hyperaldosteronism (GSH), color-blindness (e.g., visual dichromacy), autosomal recessive spinal muscular atrophy (SMA), cancer, T-cell acute lymphoblastic leukemia (T-ALL), aggressive midline carcinoma, Astrocytoma, Secretory breast carcinoma, Breast cancer, Kidney carcinoma, Mesoblastic nephroma, Lung adenocarcinoma, Melanoma, Meningioma, pleomorphic adenoma, mucoepidermoid cancer, Prostate carcinoma, Thyroid carcinoma, and acute promyelocytic leukemia.

[0606] The methods of the disclosure provide for determining the occurrence of a genetic mobility event in which a target nucleic acid can be contacted with two complexes, each complex comprising a site-directed polypeptide and a modified nucleic acid-targeting nucleic acid, and two or more effector proteins can be introduced, wherein the two or more effector proteins can bind to the modified nucleic acid-targeting nucleic acids, wherein one of the two or more effector proteins comprises a non-native sequence that is a first piece of a split system and one of the two or more effector proteins comprises a non-native sequence that is a second piece of the split system. A split system can refer to a protein complex composed of two or more protein fragments that individually are not fluorescent, but, when formed into a complex, result in a functional (that is, fluorescing) fluorescent protein complex. Individual protein fragments of a split system (e.g., split fluorescent protein) can be referred to as “complementing fragments” or “complementary fragments”. Complementing fragments which can spontaneously assemble into a functional fluorescent protein complex are known as self-complementing, self-assembling, or spontaneously-associating complementing fragments. For example, a split system can comprise GFP. In a GFP split system, complementary fragments are derived from the three dimensional structure of GFP, which includes eleven anti-parallel outer beta strands and one inner alpha strand. A first fragment can comprise one of the eleven beta-strands of the GFP molecule (e.g., GFP S11), and a second fragment can comprise the remaining strands (e.g., GFP S1-10).

[0607] Prior to the genetic mobility event the target nucleic acid sequence targetable by one complex can be far apart from the target nucleic acid sequence targetable by another sequence. The distance between the two target nucleic acid sequences can comprise at least about 0.1, 0.5, 1, 2, 3, 4, 5, 6, 7, 8, 9, 10 or more Kb. The distance between the two target nucleic acid sequences can comprise at most about 0.1, 0.5, 1, 2, 3, 4, 5, 6, 7, 8, 9, 10 or more Kb. The two target nucleic acid sequences can be located on different chromosomes. The two target nucleic acid sequences can be located on the same chromosome.

[0608] Prior to the genetic mobility event the effector proteins that comprise pieces of the split system may not be able to interact with each other (e.g., the split system can be inactive). After the genetic mobility event, the target nucleic acid sequence targetable by one complex may be located in close proximity to the target nucleic acid sequence targetable by the other complex. After the genetic mobility event, the effector proteins that comprise pieces of the split system may be able to interact with each other, thereby activating the split system.

[0609] The activated split system can indicate the occurrence of the genetic mobility event. For example, if the activated split system is a fluorescent protein split system, then prior to the genetic mobility event fluorescence may not be detected in the sample. In some instances, the levels of fluorescence of the inactive split system (e.g., background levels) may be 0.01, 0.05, 0.1, 0.5, 1, 1.5, 2, 2.5, 3, 3.5 or more fold less fluorescent compared to a control sample (e.g., cell) that does not comprise the split system. In some instances, the levels of fluorescence of the inactive split system (e.g., background level) may be 0.01, 0.05, 0.1, 0.5, 1, 1.5, 2, 2.5, 3, 3.5 or more fold more fluorescent than a control sample (e.g., cell) that does not comprise the split system.

[0610] After the genetic mobility event, the two split pieces can unite to form an active fluorescent protein, and fluorescence can be detected in the sample. An active split system can result in at least about a 0.1, 0.5, 1, 2, 3, 4, 5, 6, 7, 8, 9, 10 or more fold increase in fluorescence. An active split system can result in at most about a 0.1, 0.5, 1, 2, 3, 4, 5, 6, 7, 8, 9, 10 or more fold increase in fluorescence.

[0611] Detection of a genetic mobility can be used to genotype a subject (e.g., a patient). A genotype can be indicative of a disease. The detection of a genetic mobility event can be used to diagnose a subject. The genetic and diagnostic information obtained from the methods described herein can be communicated to a subject. The genetic and diagnostic information obtained from the methods described herein can be used to develop a subject-specific treatment plan. For example, if the data obtained from the methods of the disclosure indicate that a patient has a genotype that makes them resistant to a particular therapeutic regimen, a new treatment plan can be made for the subject.

### Altering Transcription

[0612] The methods of the disclosure can provide for altering the transcription of a nucleic acid. The method can be performed using any of the site-directed polypeptides, nucleic acid-targeting nucleic acids, and complexes of site-directed polypeptides and nucleic acid-targeting nucleic acids as described herein. The method provides for contacting a target nucleic acid with two complexes, each complex comprising a site-directed polypeptide and a modified nucleic acid-targeting nucleic acid, and introducing two or more effector proteins, wherein the two or more effector proteins can bind to the modified nucleic acid-targeting nucleic acids, wherein the one of the two or more effector proteins comprises a non-native sequence that is a first piece of a split transcription factor system and one of the two or more effector proteins comprises a non-native sequence that is a second piece of the split transcription factor system, and wherein an interaction between the first piece and the second piece of the split system forms a transcription factor that alters transcription of the nucleic acid.

[0613] The transcription factor can alter transcription levels of a nucleic acid and/or a target nucleic acid. Altered transcription can include increased transcription levels and/or decreased transcription levels. A transcription factor can alter transcription levels more than 2-fold, 3-fold, 5-fold, 10-fold, 50-fold, 100-fold, 1000-fold or more higher or lower than unaltered transcription levels. A transcription factor can alter transcription levels less than 2-fold, 3-fold, 5-fold, 10-fold, 50-fold, 100-fold, 1000-fold or more higher or lower than unaltered transcription levels.

[0614] The transcription factor can alter the transcription of a target nucleic acid and/or an exogenous nucleic acid. A target nucleic acid can be the nucleic acid that is contacted by the complex comprising the site-directed polypeptide and the nucleic acid-targeting nucleic acid. An exogenous nucleic acid can comprise a donor polynucleotide, a plasmid, and/or a target nucleic acid.

[0615] An exogenous nucleic acid can comprise a polynucleotide encoding genes involved in apoptosis. Suitable genes involved in apoptosis can include tumor necrosis factor (TNF), TNF-R1, TNF-R2, TNF receptor-associated death domain (TRADD), Fas receptor and Fas ligand, caspases (e.g., caspase-3, caspase-8, caspase-10), APAF-1, FADD, and apoptosis inducing factor (AIF). An exogenous nucleic acid can comprise a polynucleotide encoding genes that result in cell lysis. Suitable genes can include the Adenovirus death protein (ADP), defensins, membrane-permeabilizing lytic peptides derived from c-FLIP, procaspases, cell-penetrating peptides e.g. HIV TAT. An exogenous nucleic acid can comprise a polynucleotide encoding an antigen that can result in recruitment of immune cells to the cell location (e.g., MHC class peptides). An exogenous nucleic acid can comprise a polynucleotide encoding a nucleic-acid targeting nucleic acid that targets sequences that occur many times within the genome (e.g., microsatellites, tandem repeats), resulting in large scale genome fragmentation and cell-death.

### Modification of Target Nucleic Acid

[0616] The disclosure provides for methods to modify a target nucleic acid using the nucleic acid-targeting nucleic acid of the disclosure. The method can be performed using any of the site-directed polypeptides, nucleic acid-targeting nucleic acids, and complexes of site-directed polypeptides and nucleic acid-targeting nucleic acids as described herein. For example, a target nucleic acid can be contacted with a complex comprising a site-directed polypeptide, a nucleic acid-targeting nucleic acid, and one or more effector proteins, wherein the one or more effector proteins comprises a non-native sequence and can bind to the modified nucleic acid-targeting nucleic acid. The non-native sequence can confer an enzymatic activity and/or transcriptional activity of the effector protein can modify the target nucleic acid. For example, if the effector protein comprises a non-native sequence corresponding to a methyltransferase, then the methyltransferase may be able to methylate the target nucleic acid. The modification of the target nucleic acid may occur at least 1, 2, 3, 4, 5, 6, 7, 8, 9, 10, 20, 30, 40, 50, 60, 70, 80, 90, 100 or more nucleotides away from the either the 5′ or 3′ end of the target nucleic acid. The modification of the target nucleic acid may occur at most 1, 2, 3, 4, 5, 6, 7, 8, 9, 10, 20, 30, 40, 50, 60, 70, 80, 90, 100 or more nucleotides away from the either the 5′ or 3′ end of the target nucleic acid. The modification can occur on a separate nucleic acid that does not comprise the target nucleic acid (e.g., another chromosome).

[0617] Exemplary modifications can comprise methylation, demethylation, acetylation, deacetylation, ubiquitination, deubiquitination, deamination, alkylation, depurination, oxidation, pyrimidine dimer formation, transposition, recombination, chain elongation, ligation, glycosylation. Phosphorylation, dephosphorylation, adenylation, deadenylation, SUMOylation, deSUMOylation, ribosylation, deribosylation, myristoylation, remodelling, cleavage, oxidoreduction, hydrolation, and isomerization.

### Determining a Genotype and Treatment

[0618] The disclosure provides for methods for treating a disease using the nucleic acid-targeting nucleic acid of the disclosure. The method can be performed using any of the site-directed polypeptides, nucleic acid-targeting nucleic acids, and complexes of site-directed polypeptides and nucleic acid-targeting nucleic acids as described herein. For example, using the split system described herein, the presence of two or more target nucleic acids close together in space (e.g., in a genetic mobility event, in chromatin structure, or on a linear nucleic acid) can be indicative of a genotype (e.g., of a subject). A genotype can refer to the presence or absence of a particular sequence of nucleic acid, a nucleotide polymorphism (i.e., either a single nucleotide polymorphism, or a multi-nucleotide polymorphism), an allelic variant, or any other indication of the sequence of a nucleic acid. The genotype can indicate whether a patient suffers from a disease and/or is predisposed to contract a disease.

[0619] Determining a genotype can include, for example, determining if a subject comprises a mutant sequence (e.g., nucleic acid sequence comprising a mutation). In some instances, a first nucleic acid-targeting nucleic acid comprising the appropriate components as described herein to comprise a first part of a split system can be designed to target a region near a predicted mutant sequence. In some instances, a second nucleic acid-targeting nucleic acid comprising the appropriate components as described herein to comprise a second part of the split system can be designed to target a region comprising the predicted mutant sequence. If the mutant sequence does exist, the second nucleic acid-targeting nucleic acid can bind to it, and the two parts of the split system can interact. The interaction can generate a signal which can be indicative of the presence of a mutant sequence.

[0620] A genotype can be identified by a biomarker. A biomarker can be indicative of any physiological process. A biomarker can serve as a indicator of efficacy of a treatment (e.g., drug treatment). A biomarker can be a nucleic acid, a polypeptide, an analyte, a solute, a small molecule, an ion, an atom, a modification to a nucleic acid and/or polypeptide, and/or a degradation product. A biomarker can refer to relative expression levels of a nucleic acid and/or a polypeptide.

[0621] A subject-specific treatment plan may be identified from determining the genotype of the subject using the methods of the disclosure. For example, if a subject comprises a certain genotype known to be unresponsive to a particular therapy, then the subject can be treated with a different therapy. Determining of genotype can allow a subject to be selected or deselected for a clinical trial.

[0622] Determination of the genotype can be communicated from a caregiver to a subject (e.g., from a doctor to a patient, or from a person performing the genotype analysis to a customer). The communication can occur in person (e.g., in a doctor's office), over the phone, in writing, or electronically. The communication can further inform the subject of a subject-specific treatment regimen determined from the genotype of the subject.

[0623] The method can be performed more than once (e.g., iteratively) in a subject. For example, the genotype of a subject can be determined, a course of treatment can be prescribed for the subject, the genotype of the subject can be determined again. The two genotypes can be compared to determine the effectiveness of the course of treatment. The treatment plan can be altered based on the comparison of the genotypes.

### Location of Sequences in Three-Dimensional Space

[0624] In some instances, the disclosure provides for a method for determining the location of sequences in three-dimensional space in a cell. The method can be performed using any of the site-directed polypeptides, nucleic acid-targeting nucleic acids, and complexes of site-directed polypeptides and nucleic acid-targeting nucleic acids as described herein. Determining the three-dimensional organization of chromatin and nucleic acid can be important for understanding gene regulation such as transcriptional activation and/or repression of genes. In some instances, the method comprises contacting a target nucleic acid with two complexes, wherein each complex binds to its cognate target nucleic acid. The complexes can comprise a site-directed polypeptide and a nucleic acid-target nucleic acid of the disclosure. Two or more effector proteins can be introduced, wherein the each of the two or more effector proteins binds to a complex. The effector proteins can be similar to the split system described above, wherein each effector protein can comprise an inactive fragment of a whole polypeptide. When the effector proteins are far apart in space, the effector proteins are inactive (e.g., no signal is detected). When the effector proteins are close enough in space to interact, they can form a detectable active polypeptide.

[0625] The effector proteins can be part of a split affinity tag system. In a split affinity tag system, the two inactive polypeptide fragments of the system can correspond to two inactive fragments of an affinity tag. When the two fragments bind together, the whole affinity tag is restored, such that the affinity tag can be detectable by a binding agent. A binding agent can refer to a molecule that can bind and purify the affinity tag. Examples of binding agents can include antibodies, antibody-conjugated beads, and small-molecule conjugated beads.

[0626] Introduction of the complexes and polypeptides of the disclosure can occur by viral or bacteriophage infection, transfection, conjugation, protoplast fusion, lipofection, electroporation, calcium phosphate precipitation, polyethyleneimine (PEI)-mediated transfection, DEAE-dextran mediated transfection, liposome-mediated transfection, particle gun technology, calcium phosphate precipitation, direct micro injection, nanoparticle-mediated nucleic acid delivery, and the like.

[0627] The cells can be cultured with the complexes for at least 1, 2, 3, 4, 5, 6, 7, 8, 9, 10 or more days. The cells can be cultured with the complexes for at most 1, 2, 3, 4, 5, 6, 7, 8, 9, 10 or more days. After an appropriate period of time (e.g., a period of time to allow the complexes to bind to their target nucleic acid), the cells can be lysed.

[0628] The cells can be crosslinked before they are lysed. Fixed or cross-linking cells can stabilize protein-DNA complexes in the cell. Suitable fixatives and cross-linkers can include, formaldehyde, glutaraldehyde, ethanol-based fixatives, methanol-based fixatives, acetone, acetic acid, osmium tetraoxide, potassium dichromate, chromic acid, potassium permanganate, mercurials, picrates, formalin, paraformaldehyde, amine-reactive NHS-ester crosslinkers such as bis[sulfosuccinimidyl] suberate (BS3), 3,3′-dithiobis[sulfosuccinimidylpropionate] (DTSSP), ethylene glycol bis[sulfosuccinimidylsuccinate (sulfo-EGS), disuccinimidyl glutarate (DSG), dithiobis[succinimidyl propionate] (DSP), disuccinimidyl suberate (DSS), ethylene glycol bis[succinimidylsuccinate] (EGS), NHS-ester/diazirine crosslinkers such as NHS-diazirine, NHS-LC-diazirine, NHS-SS-diazirine, sulfo-NHS-diazirine, sulfo-NHS-LC-diazirine, and sulfo-NHS-SS-diazirine.

[0629] Lysed cells can be contacted with a binding agent (e.g, an antibody) that is directed to bind to the affinity tag. The contacting can occur in a test-tube. The contacting can occur in a chromatographic setting (e.g., an affinity chromatography column). Contacting with the binding agent can occur for at least 1 minute, 5 minutes, 10 minutes, 15 minutes, 20 minutes, 25 minutes, 30 minutes, 1 hour, 2 hours, 3 hours, 4 hours, 5 hours, 6 hours, 7 hours, 8 hours, 9 hours, 10 hours, 15 hours, 20 hours, 25 hours, 30 hours, 35 hours, 40 hours, 45 or more hours. Contacting with the binding agent can occur for at most 1 minute, 5 minutes, 10 minutes, 15 minutes, 20 minutes, 25 minutes, 30 minutes, 1 hour, 2 hours, 3 hours, 4 hours, 5 hours, 6 hours, 7 hours, 8 hours, 9 hours, 10 hours, 15 hours, 20 hours, 25 hours, 30 hours, 35 hours, 40 hours, 45 or more hours. In some instances, contacting with a binding agent occurs prior to cell lysis.

[0630] The complexes can be purified with the binding agent. The purified complexes can be subjected to nucleic acid purification techniques to separate the target nucleic acid from the complexes. Nucleic acid purification techniques can include spin column separation, precipitation, and electrophoresis.

[0631] The nucleic acid (e.g., nucleic acid comprising the target nucleic acid) can be subjected to sequencing methodologies. The nucleic acid can be prepared for sequencing analysis by ligation of one or more adaptors. Sequenced nucleic acids can be analyzed to identify polymorphisms, diagnose a disease, determine a course of treatment for a disease, and/or determine the three-dimensional structure of the genome.

Tagged Nucleic Acid-Targeting Nucleic Acids with Linkers

[0632] The disclosure provides for compositions and methods for generating and using tagged nucleic acid-targeting nucleic acids (FIGS. 13A, 13B, 13C and 13D). FIG. 13A depicts an exemplary untagged nucleic acid-targeting nucleic acid. An untagged nucleic acid-targeting nucleic acid can comprise a protospacer (PS), a minimum CRISPR repeat (MCR), a single guide connector (SGC), a minimum tracrRNA sequence (MtS), a 3′ tracrRNA sequence (3TS), and tracrRNA extension (TE). A tagged nucleic acid-targeting nucleic acid comprising a linker can refer to any of the nucleic acid-target nucleic acids described herein, and comprising a linker at either the 5′ end, the 3′ end, or both the 5′ and 3′ end of the nucleic acid-targeting nucleic acid.

[0633] A nucleic acid-targeting nucleic acid can comprise a non-native sequence as depicted in FIG. 13B. The non-native sequence can be referred to as a tag. The tag can be fused to either the 5′ end, the 3′ end or both the 5′ and 3′ end of the nucleic acid-targeting nucleic acid. The non-native sequence can comprise a binding sequence for an RNA-binding protein. The RNA-binding protein can be Csy4. The non-native sequence can be fused to the protospacer sequence of the nucleic acid-targeting nucleic acid.

[0634] The non-native fusion can be separated from the nucleic acid-targeting nucleic acid by a linker. FIG. 14 depicts an exemplary linker (e.g., Tag linker), separating the non-native sequence (e.g, Csy4 hairpin) from the protospacer of the nucleic acid-targeting nucleic acid. The linker sequence can be complementary to the target nucleic acid. The linker sequence can comprise at least 1, 2, 3, 4, 5, 6, 7, 8, 9, 10 or more mismatches with the target nucleic acid. The linker sequence can comprise at most 1, 2, 3, 4, 5, 6, 7, 8, 9, 10 or more mismatches with the target nucleic acid. In some instances, the fewer mismatches between the linker and target nucleic acid, the better cleavage efficiency of the Cas9: nucleic acid-targeting nucleic acid complex.

[0635] The linker sequence can be at least 1, 2, 3, 4, 5, 6, 7, 8, 9, 10, 11, 12, 13, 14, 15, 16, 17, 18, 19, 20, 25, 30, 35, 40, 45, 50, 55, 60 or more nucleotides in length. The linker sequence can be at most 1, 2, 3, 4, 5, 6, 7, 8, 9, 10, 11, 12, 13, 14, 15, 16, 17, 18, 19, 20, 25, 30, 35, 40, 45, 50, 55, 60 or more nucleotides in length.

### Multiplexed Genetic Targeting Agents

### General Overview

[0636] This disclosure describes methods, compositions, systems, and/or kits for muliplexed genome engineering. In some embodiments of the disclosure a site-directed polypeptide can comprise a nucleic acid-targeting nucleic acid, thereby forming a complex. The complex can be contacted with a target nucleic acid. The target nucleic acid can be cleaved, and/or modified by the complex. The methods, compositions, systems, and/or kits of the disclosure can be useful in modifying multiple target nucleic acids quickly, efficiently, and/or simultaneously. The method can be performed using any of the site-directed polypeptides, nucleic acid-targeting nucleic acids, and complexes of site-directed polypeptides and nucleic acid-targeting nucleic acids as described herein.

[0637] FIG. 15 depicts an exemplary embodiment of the methods of the disclosure. A nucleic acid (e.g., a nucleic acid-targeting nucleic acid) 1505 can be fused to a non-native sequence (e.g., a moiety, an endoribonuclease binding sequence, ribozyme) 1510, thereby forming a nucleic acid module 1512. The nucleic acid module 1512 (e.g., comprising the nucleic acid fused to a non-native sequence) can be conjugated in tandem, thereby forming a multiplexed genetic targeting agent (e.g., polymodule, e.g., array) 1511. The multiplexed genetic targeting agent 1511 can comprise RNA. The multiplexed genetic targeting agent can be contacted 1515 with one or more endoribonucleases 1520. The endoribonucleases can bind to the non-native sequence 1510. The bound endoribonuclease can cleave a nucleic acid module 1512 of the multiplexed genetic targeting agent 1511 at a prescribed location defined by the non-native sequence 1510. The cleavage 1525 can process (e.g., liberate) individual nucleic acid modules 1512. In some embodiments, the processed nucleic acid modules 1512 can comprise all, some, or none, of the non-native sequence 1510. The processed nucleic acid modules 1512 can be bound by a site-directed polypeptide 1530, thereby forming a complex 1531. The complex 1531 can be targeted 1535 to a target nucleic acid 1540. The target nucleic acid 1540 can by cleaved and/or modified by the complex 1531.

### Multiplexed Genetic Targeting Agents

[0638] A multiplexed genetic targeting agent can be used in modifying multiple target nucleic acids at the same time, and/or in stoichiometric amounts. A multiplexed genetic targeting agent can be any nucleic acid-targeting nucleic acid as described herein in tandem. A multiplexed genetic targeting agent can refer to a continuous nucleic acid molecule comprising one or more nucleic acid modules. A nucleic acid module can comprise a nucleic acid and a non-native sequence (e.g., a moiety, endoribonuclease binding sequence, ribozyme). The nucleic acid can be non-coding RNA such as microRNA (miRNA), short interfering RNA (siRNA), long non-coding RNA (lncRNA, or lincRNA), endogenous siRNA (endo-siRNA), piwi-interacting RNA (piRNA), trans-acting short interfering RNA (tasiRNA), repeat-associated small interfering RNA (rasiRNA), small nucleolar RNA (snoRNA), small nuclear RNA (snRNA), transfer RNA (tRNA), and ribosomal RNA (rRNA), or any combination thereof. The nucleic acid can be a coding RNA (e.g., a mRNA). The nucleic acid can be any type of RNA. In some embodiments, the nucleic acid can be a nucleic acid-targeting nucleic acid.

[0639] The non-native sequence can be located at the 3′ end of the nucleic acid module. The non-native sequence can be located at the 5′ end of the nucleic acid module. The non-native sequence can be located at both the 3′ end and the 5′ end of the nucleic acid module. The non-native sequence can comprise a sequence that can bind to a endoribonuclease (e.g., endoribonuclease binding sequence). The non-native sequence can be a sequence that is sequence-specifically recognized by an endoribonuclease (e.g., RNase T1 cleaves unpaired G bases, RNase T2 cleaves 3′end of As, RNase U2 cleaves 3′end of unpaired A bases). The non-native sequence can be a sequence that is structurally recognized by an endoribonuclease (e.g., hairpin structure, single-stranded-double-strandedjunctions, e.g., Drosha recognizes a single-stranded-double-stranded junction within a hairpin). The non-native sequence can comprise a sequence that can bind to a CRISPR system endoribonuclease (e.g., Csy4, Cas5, and/or Cas6 protein). The non-native sequence can comprise a nucleotide sequence having at least or at most about 40%, 50%, 60%, 70%, 80%, 85%, 90%, 95%, 98%, 99%, or 100%, nucleotide sequence identity and/or sequence similarity to one of the following sequences:

(SEQ ID NO: 1347)
5′-GUUCACUGCCGUAUAGGCAGCUAAGAAA-3′;
(SEQ ID NO: 1348)
5′-GUUGCAAGGGAUUGAGCCCCGUAAGGGGAUUGCGAC-3′;
(SEQ ID NO: 1349)
5′-GUUGCAAACCUCGUUAGCCUCGUAGAGGAUUGAAAC-3′;
(SEQ ID NO: 1350)
5′-GGAUCGAUACCCACCCCGAAGAAAAGGGGACGAGAAC-3′;
(SEQ ID NO: 1351)
5′-GUCGUCAGACCCAAAACCCCGAGAGGGGACGGAAAC-3′;
(SEQ ID NO: 1352)
5′-GAUAUAAACCUAAUUACCUCGAGAGGGGACGGAAAC-3′;
(SEQ ID NO: 1353)
5′-CCCCAGUCACCUCGGGAGGGGACGGAAAC-3′;
(SEQ ID NO: 1354)
5′-GUUCCAAUUAAUCUUAAACCCUAUUAGGGAUUGAAAC-3′;
(SEQ ID NO: 1348)
5′-GUUGCAAGGGAUUGAGCCCCGUAAGGGGAUUGCGAC-3′;
(SEQ ID NO: 1349)
5′-GUUGCAAACCUCGUUAGCCUCGUAGAGGAUUGAAAC-3′;
(SEQ ID NO: 1350)
5′-GGAUCGAUACCCACCCCGAAGAAAAGGGGACGAGAAC-3′;
(SEQ ID NO: 1351)
5′-GUCGUCAGACCCAAAACCCCGAGAGGGGACGGAAAC-3′;
(SEQ ID NO: 1352)
5′-GAUAUAAACCUAAUUACCUCGAGAGGGGACGGAAAC-3′;
(SEQ ID NO: 1353)
5′-CCCCAGUCACCUCGGGAGGGGACGGAAAC-3′;
(SEQ ID NO: 1354)
5′-GUUCCAAUUAAUCUUAAACCCUAUUAGGGAUUGAAAC-3′;
(SEQ ID NO: 1355)
5′-GUCGCCCCCCACGCGGGGGCGUGGAUUGAAAC-3′;
(SEQ ID NO: 1356)
5′-CCAGCCGCCUUCGGGCGGCUGUGUGUUGAAAC-3′;
(SEQ ID NO: 1357)
5′-GUCGCACUCUACAUGAGUGCGUGGAUUGAAAU-3′;
(SEQ ID NO: 1358)
5′-UGUCGCACCUUAUAUAGGUGCGUGGAUUGAAAU-3′;
and
(SEQ ID NO: 1359)
5′-GUCGCGCCCCGCAUGGGGCGCGUGGAUUGAAA-3′.

[0640] In some embodiments, wherein the non-native sequence comprises an endoribonuclease binding sequence, the nucleic acid modules can be bound by the same endoribonuclease. The nucleic acid modules may not comprise the same endoribonuclease binding sequence. The nucleic acid modules may comprise different endoribonuclease binding sequences. The different endoribonuclease binding sequences can be bound by the same endoribonuclease. In some embodiments, the nucleic acid modules can be bound by different endoribonucleases.

[0641] The moiety can comprise a ribozyme. The ribozyme can cleave itself, thereby liberating each module of the multiplexed genetic targeting agent. Suitable ribozymes can include peptidyl transferase 23S rRNA, RnaseP, Group I introns, Group II introns, GIR1 branching ribozyme, Leadzyme, hairpin ribozymes, hammerhead ribozymes, HDV ribozymes, CPEB3 ribozymes, VS ribozymes, glmS ribozyme, CoTC ribozyme, an synthetic ribozymes.

[0642] The nucleic acids of the nucleic acid modules of the multiplexed genetic targeting agent can be identical. The nucleic acid modules can differ by 1, 2, 3, 4, 5, 6, 7, 8, 9, 10, 15, 20, 25, 30, 35, 40, 45, 50 or more nucleotides. For example, different nucleic acid modules can differ in the spacer region of the nucleic acid module, thereby targeting the nucleic acid module to a different target nucleic acid. In some instances, different nucleic acid modules can differ in the spacer region of the nucleic acid module, yet still target the same target nucleic acid. The nucleic acid modules can target the same target nucleic acid. The nucleic acid modules can target one or more target nucleic acids.

[0643] A nucleic acid module can comprise a regulatory sequence that can allow for appropriate translation or amplification of the nucleic acid module. For example, an nucleic acid module can comprise a promoter, a TATA box, an enhancer element, a transcription termination element, a ribosome-binding site, a 3′ un-translated region, a 5′ un-translated region, a 5′ cap sequence, a 3′ poly adenylation sequence, an RNA stability element, and the like.

### Methods

[0644] The disclosure provides for methods for the modification of multiple target nucleic acids, simultaneously, through the use of a multiplexed genetic targeting agent. A site-directed polypeptide, an endoribonuclease, and a multiplexed genetic targeting agent can be introduced into a host cell. A vector of the disclosure (e.g., comprising a multiplexed genetic targeting agent, an endoribonuclease and/or a site-directed polypeptide) can be introduced into a host cell. In some instances, more than one endoribonuclease and/or multiplexed genetic targeting agent can be introduced into cells. If a multiplexed genetic targeting agent comprises different types of moieties, where the moieties are different endoribonuclease binding sequences, then one or more endoribonucleases corresponding to the types of binding sequences in the multiplexed genetic targeting agent may be introduced into cells.

[0645] Introduction can occur by any means to introduce a nucleic acid into a cell such viral or bacteriophage infection, transfection, conjugation, protoplast fusion, lipofection, electroporation, calcium phosphate precipitation, polyethyleneimine (PEI)-mediated transfection, DEAE-dextran mediated transfection, liposome-mediated transfection, particle gun technology, calcium phosphate precipitation, direct micro injection, nanoparticle-mediated nucleic acid delivery, and the like. The vector can be transiently expressed in the host cell. The vector can be stably expressed in the host cell (e.g., by stably integrating into the genome of the host cell).

[0646] In instances where a moiety comprises an endoribonuclease binding sequence, an endoribonuclease can be expressed and can bind to the endoribonuclease binding site on the multiplexed genetic targeting agent. The endoribonuclease can cleave the multiplexed genetic targeting agent into individual nucleic acid modules.

[0647] In instances where a moiety comprises a ribozyme, an endoribonuclease may not be required to be expressed in a host cell. The ribozyme can cleave itself, thereby resulting in cleavage of the multiplexed genetic targeting agent into individual nucleic acid modules.

[0648] Individual (e.g., cleaved) nucleic acid modules can comprise all, some, or none, of the moiety (e.g., endoribonuclease binding sequence). For example, the liberated (e.g., processed) nucleic acid module can be subjected to exonuclease trimming and/or degradation that may result in removal of the 5′ and/or 3′ end of the nucleic acid module. In such instances, exonuclease trimming and/or degradation may result in the removal of all, part, or none of the moiety (e.g., endoribonuclease binding sequence).

[0649] The liberated (e.g., processed) nucleic acid module can bind to a site-directed polypeptide thereby forming a complex. The complex can be guided to a target nucleic acid by the nucleic acid-targeting nucleic acid which can hybridize with the target nucleic acid in a sequence-specific manner. Once hybridized, the site-directed polypeptide of the complex can modify the target nucleic acid (e.g., cleave the target nucleic acid). In some instances, the modification comprises introduction of a double-stranded break in the target nucleic acid. In some instances, the modification comprises introduction of a single-stranded break in the target nucleic acid.

[0650] In some embodiments, one or more donor polynucleotides and/or vectors encoding the same can introduced into the cell. One or more donor polynucleotides can be incorporated into the modified (e.g., cleaved) target nucleic acids, thereby resulting in an insertion. The same donor polynucleotide can be incorporated into multiple cleavage sites of target nucleic acids. One or more donor polynucleotides can be incorporated into one or more cleavage sites of target nucleic acids. This can be referred to as multiplex genome engineering. In some instances, no donor polynucleotide and/or vector encoding the same may be introduced into the cells. In these instances, the modified target nucleic acid can comprise a deletion.

### Stoichiometric Delivery of Nucleic Acids

### General Overview

[0651] The disclosure provides for compositions, methods, and kits for stoichiometric delivery of a nucleic acid to a cell and/or subcellular localization. The stoichiometric delivery may be mediated by a complex. FIG. 16 depicts an exemplary complex for stoichiometric delivery of a plurality of nucleic acids to a cell and/or subcellular location. The complex can comprise a plurality of nucleic acids 1605. Each nucleic acid can comprise a nucleic acid-binding protein binding site 1610. The nucleic acid-binding protein binding sites 1610 can all be the same sequences, different sequences, or some can be same sequences and some can be different sequences. In some embodiments, the nucleic acid-binding protein binding sites can bind a Cas6, Cas5, or Csy4 family member. The complex can comprise a tandem fusion polypeptide 1630. The tandem fusion polypeptide can comprise nucleic acid-binding proteins 1625 fused together in tandem. The nucleic acid-binding proteins can be separated by a linker 1620. The nucleic acid-binding proteins 1625 can be the same protein, can be different proteins, or some can be the same proteins and some can be different proteins. The nucleic acid-binding proteins 1625 can be Csy4 proteins. The nucleic acid-binding proteins 1625 can bind the nucleic acid-binding protein binding site 1610 on the nucleic acid 1605. The tandem fusion polypeptide 1630 can comprise a non-native sequence 1615. In some instances, the non-native sequence is a subcellular (e.g., nuclear) localization sequence. In some embodiments, the nucleic acid 1605 can encode a non-native sequence (e.g. a subcellular, (e.g., nuclear) localization sequence). The complex can be introduced 1635 into cells, wherein one or more of the nucleic acids 105 can be translated into polypeptides 1640. A translated polypeptide 1640 can bind and cleave the nucleic acid-binding protein binding site 1610 on the nucleic acid 1605. The cleavage 1645 can liberate the nucleic acid 1650 which can be a nucleic acid-targeting nucleic acid. The liberated nucleic acid 1650 can bind to a translated polypeptide 1645 (e.g., a site-directed polypeptide), thereby forming a unit. The translated polypeptide 1645 can comprise a nuclear localization signal. The unit can translocate to the nucleus, wherein the unit can be guided to a target nucleic acid hybridizable with the spacer of the liberated nucleic acid 1650. The unit can be hybridized to a target nucleic acid. The site-directed polypeptide of the unit can cleave the target nucleic acid. The cleavage of the target nucleic acid can be referred to as genome engineering. The method can be performed using any of the site-directed polypeptides, nucleic acid-targeting nucleic acids, and complexes of site-directed polypeptides and nucleic acid-targeting nucleic acids as described herein.

[0652] In some embodiments, multiple nucleic acid-targeting nucleic acids can be stoichiometrically delivered to a cell and/or subcellular location. FIG. 17 depicts an exemplary complex for stoichiometric delivery of a plurality of nucleic acids. The complex can comprise a plurality of nucleic acids 1705. Each nucleic acid can comprise a plurality of nucleic acid-binding protein binding sites 1710/1711. The nucleic acid-binding protein binding sites 1710/1711 can all be the same sequences, different sequences, or some can be same sequences and some can be different sequences. In some embodiments, the nucleic acid-binding protein binding sites 1710/1711 can bind a Cas6, Cas5, or Csy4 family member. The complex can comprise a tandem fusion polypeptide 1730. The tandem fusion polypeptide can comprise nucleic acid-binding proteins 1725 fused together in tandem. The nucleic acid-binding proteins can be separated by a linker 1720. The nucleic acid-binding proteins 1725 can be the same protein, can be different proteins, or some can be the same proteins and some can be different proteins. The RNA-binding proteins 1725 can be a combination of Csy4, Cas5, and Cas6 polypeptides. The nucleic acid-binding proteins 1725 can bind the nucleic acid-binding protein binding site 1710 on the nucleic acid 1705. The tandem fusion polypeptide 1730 can comprise a non-native sequence 1715. In some instances, the non-native sequence is a subcellular (e.g., nuclear) localization sequence. In some embodiments, the nucleic acid 1705 can encode for a non-native sequence (e.g. a subcellular, (e.g., nuclear) localization sequence). The complex can be introduced into cells 1735, wherein one or more of the nucleic acids can be translated into polypeptides 1740/1750. A translated polypeptide 1740 can bind and cleave the nucleic acid-binding protein binding site 1711 on the nucleic acid 1705. The cleavage 1745 can liberate the nucleic acid 1755, which can be a nucleic acid-targeting nucleic acid and/or a donor polynucleotide. The liberated nucleic acid 1755 can bind to a translated polypeptide 1750 (e.g., a site-directed polypeptide), thereby forming a unit. In some instances, the translated polypeptide 1750 comprises a nuclear localization signal. The unit can translocate to the nucleus, wherein the unit can be guided to a target nucleic acid hybridizable with the spacer of the liberated RNA 1755. The unit can be hybridized to a target nucleic acid. The site-directed polypeptide of the unit can cleave the target nucleic acid.

### Methods

[0653] The disclosure provides for methods for stoichiometric delivery of nucleic acids to a cell (e.g., stoichiometrically deliverable nucleic acids). The method can comprise binding a tandem fusion polypeptide to a plurality of stoichiometrically deliverable nucleic acids, thereby forming a complex. The complex can comprise stoichiometric amounts of the nucleic acids (e.g., the complex can comprise the plurality of nucleic acids in a prescribed ratio and/or amount). 1, 2, 3, 4, 5, 6, 7, 8, 9, 10 or more nucleic acids can be stoichiometrically delivered. In some instances, 3 stoichiometrically deliverable nucleic acids can be stoichiometrically delivered. In some instances, 4 stoichiometrically deliverable nucleic acids can be stoichiometrically delivered.

[0654] The stoichiometrically deliverable nucleic acid can encode for a polypeptide or a non-coding RNA. The polypeptide may be a CRISPR system polypeptide (e.g., a site-directed polypeptide, an endoribonuclease). The stoichiometrically deliverable nucleic acid can encode for more than one polypeptide. The stoichiometrically deliverable nucleic acid can comprise a plurality of stoichiometrically deliverable nucleic acids (e.g., in an array). The stoichiometrically deliverable nucleic acid can encode for a non-coding RNA. Examples of non-coding RNAs can include microRNA (miRNA), short interfering RNA (siRNA), long non-coding RNA (lncRNA, or lincRNA), endogenous siRNA (endo-siRNA), piwi-interacting RNA (piRNA), trans-acting short interfering RNA (tasiRNA), repeat-associated small interfering RNA (rasiRNA), small nucleolar RNA (snoRNA), small nuclear RNA (snRNA), transfer RNA (tRNA), and ribosomal RNA (rRNA). The stoichiometrically deliverable nucleic acid can be RNA.

[0655] The stoichiometrically deliverable nucleic acid can encode for a non-native sequence. In some instances, the stoichiometrically deliverable nucleic acid encodes for a non-native sequence such that when a polypeptide is translated from a stoichiometrically deliverable nucleic acid encoding a polypeptide, the polypeptide is fused to the non-native sequence (e.g., thereby generating a fusion protein). The non-native sequence can be a peptide affinity tag. The non-native sequence (e.g., peptide affinity tag) can be located at the N-terminus of the polypeptide, the C-terminus of the polypeptide, or any location within the polypeptide (e.g., a surface accessible loop). In some embodiments, the non-native sequence is a nuclear localization signal (NLS). A NLS can be monopartite or bipartite sequence. The NLS can be recognized by nuclear import machinery (e.g., importins). A NLS can be a small peptide (e.g., PKKKRKV (SEQ ID NO: 1363) of the SV40 large t-antigen). A NLS can be a polypeptide domain (e.g., acidic M9 domain of hnRNP A1).

[0656] The non-native sequence can be a nucleic acid affinity tag (e.g., nucleic acid localization signal). For example, a stoichiometrically deliverable nucleic acid encoding a DNA (e.g., a donor polynucleotide) can comprise a nucleic acid localization signal which can localize the DNA to the nucleus. Such nucleic acid localization signals can include, for example, peptide-nucleic acid (PNA) sequences.

[0657] The stoichiometrically deliverable nucleic acids can comprise regulatory sequences that can allow for appropriate translation or amplification of the nucleic acid. For example, an nucleic acid can comprise a promoter, a TATA box, an enhancer element, a transcription termination element, a DNA stability element, a ribosome-binding site, a 3′ un-translated region, a 5′ un-translated region, a 5′ cap sequence, a 3′ poly adenylation sequence, an RNA stability element, and the like.

[0658] The nucleic acid can comprise a nucleic acid-binding protein binding site. The nucleic acid-binding protein binding site can be bound by an nucleic acid-binding protein. The nucleic acid-binding protein binding site can be bound by a CRISPR polypeptide (e.g., a site-directed polypeptide, an endoribonuclease). The nucleic acid-binding protein binding site can be bound by a Cas5 or Cas6 family polypeptide. The nucleic acid-binding protein binding site can be bound by a Csy4, Cas5, or Cas6 polypeptide. Some examples of nucleic acid-binding protein binding sites can include, for example, sequences that can be bound by RNA-binding proteins such as the MS2 binding sequence, the U1A binding sequence, the boxB sequence, the eIF4A sequence, hairpins, sequences that can be bound by RNA recognition motif (RRM) domains (e.g., U1A), sequences that can be bound by double-stranded RNA binding domains (dsRBD) (e.g., Staufen), sequences that can be bound PAZ domains (e.g., PAZ, Argonaute), sequences that can be bound by PIWI domains (e.g., PIWI, MILI, MIWI, Argonaute), and the like. Some examples of nucleic acid-binding protein binding sites can include, for example, sequences that can be bound by DNA-binding proteins such as zinc fingers, a helix-turn-helix domain, a zinc finger domain, a leucine zipper (bZIP) domain, a winged helix domain, a winged helix turn helix domain, a helix-loop-helix domain, a HMG-box domain, a Wor3 domain, an immunoglobulin domain, a B3 domain, a TALE domain, and the like.

[0659] The nucleic acid can comprise one or more nucleic acid-binding protein binding sites. The nucleic acid can comprise 1, 2, 3, 4, 5, 6, 7, 8, 9, 10 or more nucleic acid-binding protein binding sites. The one or more nucleic acid-binding protein binding sites may be the same. The one or more nucleic acid-binding protein binding sites may be different. For example, the nucleic acid can comprise a Csy4 binding site and a MS2 binding site. The one or more nucleic acid-binding protein binding sites can be separated by 1, 2, 3, 4, 5, 6, 7, 8, 9, 10, 20, 30, 40, 50, 60, 70, 80, 90, 100, 110, 120, 130, 140, 150, 160, 170, 180, 190, 200, 250, 300, 350, 400, 450, 500 or more nucleotides. In some embodiments, the 3′-most nucleic acid-binding protein binding site can be bound by a tandem fusion polypeptide of the disclosure.

### Tandem Fusion Polypeptide

[0660] In some embodiments, the method of the disclosure provides for binding a plurality of nucleic acids to a tandem fusion polypeptide. A tandem fusion polypeptide can comprise a plurality of nucleic acid binding proteins fused together in one polypeptide chain. A tandem fusion polypeptide can comprise 1, 2, 3, 4, 5, 6, 7, 8, 9, 10 or more nucleic acid-binding proteins. Nucleic acid-binding proteins of the tandem fusion polypeptide can bind to the nucleic acid-binding protein binding sites of the nucleic acids of the disclosure. Examples of nucleic acid-binding proteins can include MS2, U1A, boxB sequence binding proteins (e.g., zinc fingers), cIF4A, Staufen, PAZ, Argonaute, PIWI, MILI, MIWI, zinc fingers, a helix-turn-helix domain, a zinc finger domain, a leucine zipper (bZIP) domain, a winged helix domain, a winged helix turn helix domain, a helix-loop-helix domain, a HMG-box domain, a Wor3 domain, an immunoglobulin domain, a B3 domain, a TALE domain, and the like. In some embodiments, the nucleic acid-binding protein is an RNA-binding protein. The RNA-binding protein can be a member of a CRISPR system. In some embodiments, the RNA-binding protein can be a member of the Cas5 or Cas6 family of proteins. In some embodiments, the RNA-binding protein can be Csy4, Cas5, Cas6, or any combination thereof. In some embodiments, the nucleic acid-binding protein is a DNA-binding protein (e.g., a zinc finger).

[0661] In some instances, the nucleic acid-binding proteins are separated by a linker. A linker can comprise about 1, 2, 3,4, 5, 6, 7, 8, 9, 10, 20, 30, 40, 50, 60, 70, 80, 90, 100 or more amino acids.

[0662] A tandem fusion polypeptide can comprise a non-native sequence (e.g., peptide affinity tag). The non-native sequence can comprise a nuclear localization signal (NLS) that can direct the tandem fusion polypeptide to a subcellular location (e.g., nucleus).

[0663] Each nucleic acid-binding protein of the tandem fusion polypeptide can comprise its own non-native sequence. The non-native sequence of each nucleic acid-binding protein can be the same. The non-native sequence of each nucleic acid-binding protein can be different. The non-native sequence of some of the nucleic acid-binding proteins of the tandem fusion polypeptide can be the same and the non-native sequence of some of the nucleic acid-binding proteins of the tandem fusion polypeptide can be different.

[0664] In some instances, the methods of the disclosure can provide for forming a complex comprising a tandem fusion polypeptide and a plurality of nucleic acids of the disclosure. Formation of the complex can comprise the nucleic acid-binding proteins of the tandem fusion polypeptide binding to their cognate nucleic acid-binding protein binding sequence in the nucleic acids of the disclosure. For example, a stoichiometrically deliverable nucleic acid comprising a Csy4 binding site, can bind to the Csy4 protein subunit in the tandem fusion protein. Thecomplex can be formed outside of cells (e.g., in vitro). The complex can be formed in cells (e.g., in vivo). When a complex is formed in vitro it can be introduced into a cell by, for example, transfection, transformation, viral transduction, electroporation, injection, and the like.

[0665] The methods of the disclosure provide for therapeutic delivery of multiple nucleic acids both in vivo, in vitro, and ex vivo. The delivered nucleic acids can be used to treat a disease. For example, the delivered nucleic acids can be used in gene therapy and/or can integrate into the genome of the cell, thereby providing a therapeutic outcome. A therapeutic outcome can refer to increase or decrease in the levels of a protein, nucleic acid, or any biological molecule related to a disease such as a degradation product, small molecule, and/or ion. For example, a therapeutic outcome can comprise increasing the levels of an anti-inflammatory gene, or decreasing the levels of a protein in a pathway related to a disease. A therapeutic outcome can refer to a physiological effect. Physiological effects can include, morphological changes, metabolic changes, and/or structural changes in a cell. A therapeutic outcome can refer to changes in the modifications of a protein and/or nucleic acid, such as glycosylation, acetylation, methylation, demethylation, depurination, ubiquitinylation, and the like.

[0666] A therapeutic outcome can be measured by changes in the genetic makeup of the cell, the levels of biomolecules of interest in the cell, and/or the physiological changes in the cell. Measurements can be made using molecular biology techniques such as spectroscopy, spectrometry, sequencing, ELISA, microscopy, and/or x-ray crystallography. Measurements can be made using animal models, such as mouse, rats, dogs, and primates. For example, genetically modified cells of the disclosure can be introduced into mice and assessed for biological and physiological changes such as, for example, the ability to metastasize and/or differentiate.

### Spacers for Blood Disorders

[0667] This disclosure provides for compositions, methods and kits, for genetic engineering of hematopoietic stem cells (HSCs).

### Compositions

[0668] A HSC can comprise a site-directed polypeptide (e.g., Cas9).

[0669] A HSC can comprise a nucleic acid-targeting nucleic acid. The nucleic acid-targeting nucleic acid of the disclosure can target a gene involved in a genetic disorder.

[0670] Table 2 lists exemplary genes that are involved in disorders. The genes listed in Table 2 can be genes that can be targeted by a nucleic acid-targeting nucleic acid. The nucleic acid-targeting nucleic acid of the disclosure can comprise a spacer that can target a gene listed in Table 2.

[0671] Table 2 depicts exemplary spacers of the nucleic acid-targeting nucleic acids of the disclosure. Each spacer of Table 2 can be a spacer that can be inserted into a nucleic acid-targeting nucleic acid. Exemplary spacers are companied by the name of the disorder and the gene involved in the disorder that is targeted by the spacers.

TABLE 2
Spacers of blood disorders.

| Gene | Spacer | Disease |
|---|---|---|
| Arylsulfatase A | AGGGTTTATTTTCTTACGCT | Metachromatic Leukodystrophy |
| | (SEQ ID NO: 1364) | |
| Wiskott-Aldrich | CCGAGGTCCCTAGTCCGGAA | Wiskott-Aldrich Syndrome |
| Syndrome | (SEQ ID NO: 1365) | |
| protein | | |
| ATP-binding | CGGAGGTGGGCGGAGCCTCC | Adrenoleukodystrophy |
| cassette D1 | (SEQ ID NO: 1366) | |
| C-C chemokine | AGCTTTCTCGTCTGGGTATT | Human Immunodeficiency Virus |
| receptor type 5 | (SEQ ID NO: 1367) | |
| Hemoglobin beta | GAAAATAAATGTTTTTTATT | Beta-thalassemia |
| subunit | (SEQ ID NO: 1368) | |
| Interleukin-2 | ACAGAAACTTTATTTCTCAT | X-linked Severe Combined ID |
| recetor subunit | (SEQ ID NO: 1369) | |
| gamma | | |
| Cystinosin | CTTTGGGAGGCCGAGGCGGG | MLSD cystinosis |
| | (SEQ ID NO: 1370) | |
| Ribosomal | TTTTAGAAACAGTATGAGAT | Diamon-Blackfan anemia |
| protein S19 | (SEQ ID NO: 1371) | |
| Fanconi anemia | ATGCACAAAATAAACAGCAG | Fanconi Anemia |
| complimentation | (SEQ ID NO: 1372) | |
| group B | | |
| Shwachman- | GAGTTAGTTCACATCTACAG | Shwachman-Bodian-Diamond |
| Bodian-Diamond | (SEQ ID NO: 1373) | syndrome |
| syndrome gene | | |

### Methods

[0672] The disclosure provides for methods for introducing a nucleic acid-targeting nucleic acid and site-directed polypeptide into an HSC. In some embodiments, the HSC is extracted from a patient prior to introduction. The extracted HSC can be purified (e.g., by apheresis). The site-directed polypeptide and/or the nucleic acid-targeting nucleic acid can be introduced into an HSC that has been purified. The site-directed polypeptide and/or the nucleic acid-targeting nucleic acid can be introduced into an HSC that has not been purified. The introduction can occur in an HSC in vitro (e.g., outside of the patient, extracted cell). In some instances, the introduction occurs in an HSC in vivo (e.g., inside of a patient, unextracted cell).

[0673] Introduction of the site-directed polypeptide and/or the nucleic acid-targeting nucleic acid of the disclosure can occur by for example, viral transduction, transfection, electroporation, optical transfection and/or chemical transfection.

[0674] Once introduced into a HSC, the nucleic acid-targeting nucleic acid of the disclosure and the site-directed polypeptide can form a complex. The complex can be guided to a target nucleic acid (e.g., the genes listed in Table 3) by the nucleic acid-targeting nucleic acid. The nucleic acid-targeting nucleic acid can hybridize with the target nucleic acid. The site-directed polypeptide can modify the target nucleic acid (e.g., by cleaving the target nucleic acid).

[0675] In some instances, the modified target nucleic acid comprises a deletion. In some instances, the modified target nucleic acid comprises an insertion of a donor polynucleotide. A donor polynucleotide, a portion of a donor polynucleotide, a copy of a donor polynucleotide or a portion of a copy of a donor polynucleotide can be inserted into a target nucleic acid. The method can be performed using any of the site-directed polypeptides, nucleic acid-targeting nucleic acids, and complexes of site-directed polypeptides and nucleic acid-targeting nucleic acids as described herein.

TABLE 3
List of Genes Involved in Diseases.

| Name of Disease | Gene(s) |
|---|---|
| Metachromatic leukodystrophy (MLD) | Arylsulfatase A |
| Wiskott-Aldrich syndrome (WAS) | Wiskott-Aldrich Syndrome protein |
| Wiskott-Aldrich syndrome (WAS) | Leukosialin |
| Neutropenia | Wiskott-Aldrich Syndrome protein |
| Adrenoleukodystrophy | ATP-binding cassette D1 |
| Human Immunodeficiency Virus (HIV) | C-C chemokine receptor type 5 |
| Beta-thalassemia | hemoglobin subunit beta |
| Sickle-cell anemia | hemoglobin subunit beta |
| X-linked Severe Combined | Interleukin-2 receptor subunit gamma |
| Immunodeficiency (X-SCID) | |
| Multisystemic Lysosomal Storage | Cystinosin |
| Disorder cystinosis | |
| Diamond-Blackfan anemia | Ribosomal protein S19 |
| Fanconi Anemia | Fanconi anemia complementation groups A, |
| | B and C |
| Shwachman-Bodian-Diamond syndrome | SBDS gene |
| Gaucher′s disease | Glucocerebrosidase |
| Hemophilia A | Anti-hemophiliac factor OR Factor VIII |
| Hemophilia B | Christmas factor, Serine protease, Factor IX |
| Adenosine deaminase deficiency (ADA- | Adenosine deaminase |
| SCID) | |
| GM1 gangliosidoses | beta-galactosidease |
| Glycogen storage disease type II, Pompe | acid alpha-glucosidase |
| disease, acid maltase deficiency | |
| Niemann-Pick disease, SMPD1-associated | Sphingomyelin phosphodiesterase 1 OR acid |
| (Types A and B) | sphingomyelinase |
| Krabbe disease, globoid cell | Galactosylceramidase OR |
| leukodystrophy, galactosylceramide | galactercerebrosidease |
| lipidosis | |
| Multiple Sclerosis (MS) | Human leukocyte angitens DR-15, DQ-6, |
| | DRB1 |

### Computational Methods

[0676] The disclosure provides for computational methods to identify spacers for nucleic acid-targeting nucleic acids. The computational method can comprise scanning the nucleic acid sequence of a genome for a protospacer adjacent motif. Upon finding a protospacer adjacent motif, the program can automatically count between 10-30 nucleotides upstream of the protospacer adjacent motif. The 10-30 nucleotides upstream of the protospacer adjacent motif can constitute a putative spacer sequence. In other words, the 10-30 nucleotides upstream of the protospacer adjacent motif in the genome can correspond to a target nucleic acid, and a sequence complementary to the target nucleic acid can be referred to as a spacer.

[0677] The program can test every sequence iteration of the putative spacer sequence to ascertain how effective the sequence will be as a spacer in a nucleic acid-targeting nucleic acid. For example, the program can take each iteration of the putative spacer sequence and perform an in silico secondary structure prediction on the sequence. The secondary structure prediction can comprise appending the putative spacer sequences to a nucleic acid-targeting nucleic acid backbone (e.g., the nucleic acid-targeting nucleic acid without the spacer). The secondary structure prediction can perform a secondary structure prediction analysis of the docked putative spacer sequence in the nucleic acid-targeting nucleic acid backbone. Secondary structure prediction analysis can comprise, for example, predicting which nucleotides may form duplexes, hairpins, which nucleotides are unstructured, and/or which nucleotides may be unpaired.

[0678] The computational method can comprise implementing a folding test on each putative spacer sequence that has undergone secondary structure prediction analysis. The folding test can comprise in silico folding of the nucleic acid-targeting nucleic acid comprising the putative spacer sequence. The nucleic acid-targeting nucleic acid and putative spacer sequence can either pass or fail the folding test.

[0679] To pass the folding test, the secondary structure of the backbone nucleic acid-targeting nucleic acid may need to be conserved, less than 5, 4, 3, 2, or 1 nucleotide in the spacer hybridize with nucleotides outside of the spacer, and other second structure in the spacer is contained within the spacer.

### Seamless Reporter Selection

### General Overview

[0680] This disclosure describes methods, compositions, systems and kits for genetic modification of cells and selection of such genetically modified cells by seamless incorporation, detection and excision of a reporter element. In some embodiments of the disclosure, a donor polynucleotide can comprise a nucleic acid to be introduced to a cell genome (here called the genetic element of interest) as well as a nucleic acid sequence encoding a reporter element (e.g. GFP), a site-directed polypeptide and two nucleic acid-targeting nucleic acids. Either the site-directed polypeptide, the nucleic acid-targeting nucleic acids, and/or all three may be controlled by an inducible promoter. A site-directed polypeptide and a nucleic acid-targeting nucleic acid may form a complex which can target a site in the cell genome by hybridization of the nucleic acid targeting nucleic acid to a target nucleic acid in the genome. The site-directed polypeptide of the complex may cleave the target nucleic acid. The donor polynucleotide can be inserted into the cleaved target nucleic acid. After introduction of a double strand break (or single strand break) at the target site in the presence of the donor polynucleotide, the population of recipient cells may be screened for the presence of the reporter molecule as a proxy for the presence of the genetic element of interest. After isolation of reporter molecule-containing cells, the reporter element can be excised by induction of the site-directed polypeptide and/or nucleic acid-targeting nucleic acid expression. The nucleic acid-targeting nucleic acids can target the 5′ and 3′ ends of the reporter element and can result in the excision of the reporter element. The method can be performed using any of the site-directed polypeptides, nucleic acid-targeting nucleic acids, and complexes of site-directed polypeptides and nucleic acid-targeting nucleic acids as described herein.

[0681] FIG. 18 depicts an exemplary embodiment of the methods of the disclosure. A nucleic acid can comprise a plurality of genetic elements 1805/1810. The genetic elements 1805 and 1810 can be, for example, genes, non-coding nucleic acids, introns, exons, DNA and/or RNA. The genetic elements 1805 and 1810 can be parts of the same gene. In between the genetic elements can be a target nucleic acid 1806 suitable for genetic engineering. A site-directed polypeptide and a nucleic acid-targeting nucleic acid of the disclosure can form a complex which can target 1815 the target nucleic acid 1806. The site-directed polypeptide of the complex can cleave 1820 the target nucleic acid 1806. A donor polynucleotide can be inserted 1825 into the cleaved target nucleic acid 1806. The donor polynucleotide can comprise a genetic element of interest 1830. The genetic element of interest 1830 can be a gene. The donor polynucleotide can also comprise a reporter element 1835. The donor polynucleotide can also comprise a polynucleotide sequence encoding a site-directed polypeptide and one or more nucleic acid-acid targeting nucleic acid. In some instances, the polynucleotide encoding the site-directed polypeptide and the one or more nucleic acid-targeting nucleic acids encodes two nucleic acid-targeting nucleic acids. The polynucleotide sequence encoding the site-directed polypeptide and the nucleic acid targeting nucleic acid can be operably linked to an inducible promoter. Insertion of the donor polynucleotide into the target nucleic acid 1806 can result in the expression of the reporter element 1835. The reporter element 1835 can be used as a way to select cells that comprise the donor polynucleotide.

[0682] FIG. 19 depicts an exemplary embodiment for the removal of the reporter element 1915 from the target nucleic acid. A target nucleic acid can comprise a plurality of genetic elements 1905/1920. The reporter element 1915 can be fused to a genetic element of interest 1910. Expression of the reporter gene 1915 can be induced which can result in the production of a site-directed polypeptide and one or more nucleic acid-targeting nucleic acids. The site-directed polypeptide can form complexes with the nucleic acid-targeting nucleic acids. The complexes can be guided to the reporter element 1915 by the nucleic acid-targeting nucleic acid of the complex. One of the two nucleic acid-targeting nucleic acids can target 1925 the 5′ end of the reporter element 1915. One of the two nucleic acid-targeting nucleic acids can target 1930 the 3′ end of the reporter element 1915. The targeted ends of the reporter element 1915 can be cleaved by the site-directed polypeptide of the complex, thereby excising 1935 the reporter element 1915. The target nucleic acid can comprise the genetic element of interest 1910 portion of the donor polynucleotide. The nucleic acid-targeting nucleic acids can be designed such that the donor polynucleotide is excised (including the genetic element of interest).

### Methods

[0683] The present disclosure provides for methods of selecting cells using a reporter element and excision of the reporter element. A site-directed polypeptide, an endoribonuclease, a nucleic acid targeting nucleic acid, a donor polynucleotide and/or a nucleic acid-targeting nucleic acid can be introduced into a cell. The donor polynucleotide may include one or more genetic elements of interest. The donor polynucleotide may include one or more reporter elements. The donor polynucleotide includes one or more genetic elements of interest and one or more reporter elements. More than one site-directed polypeptide, endoribonuclease, donor polynucleotide and and/or nucleic acid-targeting nucleic acid can be introduced into a cell. In some instances, the cell already expresses a site-directed polypeptide, and/or a nucleic acid-targeting nucleic acid. In some instances, the site-directed polypeptide, and/or nucleic acid targeting nucleic acid are encoded on a plasmid. In some instances, the site-directed polypeptide, and/or nucleic acid targeting nucleic acid is encoded on more than one plasmid. In some instances, more than one site-directed polypeptide or nucleic acid encoding a site-directed polypeptide is introduced into the cell. In some instances, the cell is a cell lysate.

[0684] Introduction can occur by any means to introduce a nucleic acid into a cell such as viral or bacteriophage infection, transfection, conjugation, protoplast fusion, lipofection, electroporation, calcium phosphate transfection, polyethyleneimine (PEI)-mediated transfection, DEAE-dextran mediated transfection, liposome-mediated transfection, particle gun technology, calcium phosphate precipitation, direct micro injection, nanoparticle-mediated nucleic acid delivery, and the like. The vector can be transiently expressed in the host cell. The vector can be stably expressed in the host cell (e.g., by stably integrating into the genome of the host cell).

[0685] A nucleic acid targeting nucleic acid can bind to a nucleic acid characterized by a particular target sequence and/or any sequence homologous to a particular sequence. The target sequence can be part or all of a gene, a 5′ end of a gene, a 3′ end of a gene, a regulatory element (e.g. promoter, enhancer), a pseudogene, non-coding DNA, a microsatellite, an intron, an exon, chromosomal DNA, mitrochondrial DNA, sense DNA, antisense DNA, nucleoid DNA, chloroplast DNA or RNA among other nucleic acid entities.

[0686] The site-directed polypeptide can cleave the target nucleic acid bound by a nucleic acid targeting nucleic acid. The site-directed polypeptide may not cleave the target nucleic acid. In some instances, an endoribonuclease cleaves the target nucleic acid. The endoribonuclease can be encoded by the vector. The endoribonuclease can be encoded by the donor polynucleotide. The endoribonuclease can be present in the cell. Expression of the endoribonuclease and/or site-directed polypeptide can be induced by a conditional promoter. A donor polynucleotide can be incorporated in the target nucleic acid at the site where it was cleaved.

### Excision

[0687] The methods disclosed herein may further comprise excision of all, some or none of the reporter element. A first nucleic acid-targeting nucleic acids of the reporter element can target the 5′ end of the reporter element. A second nucleic acid-targeting nucleic acids of the reporter element can target the 3′ end of the reporter element. A nucleic acid-targeting nucleic acid can target both the 5′ and 3′ ends of the reporter element. A nucleic acid-targeting nucleic acid can target two sequences in the reporter element and/or donor polynucleotide. The two target sequences can be at least about 70, 75, 80, 85, 90, 91, 92, 93, 94, 95, 96, 97, 98, 99 or 100% identical. The two target sequences can be at most about 70, 75, 80, 85, 90, 91, 92, 93, 94, 95, 96, 97, 98, 99 or 100% identical. When the nucleic acid-targeting nucleic acids of the reporter element are expressed, they may form a complex with a site-directed polypeptide and target the 5′ and 3′ ends of the reporter element by hybridizing to a complementary region on the 5′ and 3′ ends of the reporter element. Hybridization of the complex with the reporter element can result in cleavage of all, some or none of the reporter element. The cleaved nucleic acid can be rejoined by, for example, non-homologous end-joining. The rejoined nucleic acid may not introduce a deletion or insertion. The rejoined nucleic acid may introduce a deletion or insertion. The cleaved nucleic acid can be rejoined by, for example, homologous recombination. Homologous recombination can be used to rejoin a cleaved nucleic acid when the target nucleic acid sites are substantially identical.

### Screening

[0688] The methods disclosed herein may further comprise excising a reporter element from a selected cell, thereby forming a second cell; and screening the second cell. Screening may comprise screening for the absence of all or some of the reporter element. Screening can include fluorescence-activated cell-sorting (FACS), wherein cells expressing a fluorescent protein encoded for by the reporter element are separated from cells that do not express a fluorescent protein. Cells may be contacted with fluorescent protein, fluorescent probe or fluorochrome conjugated antibodies that bind proteins encoded for by the reporter element or genetic element and subsequently selected by FACS. Fluorochromes can include but are not limited to Cascade Blue, Pacific Blue, Pacific Orange, Lucifer yellow, NBD, R-Phycoerythrin (PE), PE-Cy5 conjugates, PE-Cy7 conjugates, Red 613, PerCP, TruRed, FluorX, Fluorescein, BODIPY-FL, TRITC, Texas Red, Allophycocyanin, APC-Cy7 conjugates (PharRed), various Alexa Fluor dyes, Cy2, Cy3, Cy3B, Cy3.5, Cy5, Cy5.5, Cy7, various DyLights, Y66H, Y66F, EBFP, EBFP2, Azuritc, GFPuv, T-Sapphire, TagBFP, Cerulean, mCFP, ECFP, CyPet, Y66W, dKcima-Red, mKcima-Red, TagCFP, AmCyan1, mTFP1, S65A, Midoriishi-Cyan, GFP, Turbo GFP, TagGFP, TagGFP2, AcGFP1, S65L, Emerald, S65T, S65C, EGFP, Azami-Green, ZaGreen1, Dronpa-Green, TagYFP, EYFP, Topaz, Venus, mCitirine, YPet, Turbo YFP, PhiYFP, PhiYFPm, ZaYellow1, mBanana, Kusabira-Orange, mOrange, mOranc2, mKO, TurboRFP, tdTomato, DsRed-Express2, TagRFP, DsRed monomer, DsRed2, mStrawberry, Turbo FP602, AsRed2, mRFP1, J-Red, mCherry, HcRed1, mKate2, Katushka, mKate, TurboFP635, mPlum, mRaspberry, mNeptune, E2-Crimson.

[0689] Cells may be contacted with antibodies that bind peptide affinity tags encoded for by the reporter element or genetic element and subsequently can be selected by immunomagnetic beads which recognize the antibodies. Screening may comprise staining cells by adding X-gal when the reporter element or genetic element encodes b-galactosidase. Screening may comprise manual sorting (e.g. diluting cell suspensions) and microscopy (e.g. fluorescence microscopy). Screening may comprise high-content screening.

[0690] Reporter elements may encode drug resistance genes, thereby allowing for selection of cells containing the reporter element by the addition of drugs, the drugs killing the cells that do not express the reporter element. Such drug can include, but are not limited to erythromycin, clindamycin, chloramphenicol, gentamicin, kanamycin, streptomycin, tetracycline, the combination quinupristin-dalfopristin, enrofloxacin, vancomycin, oxacillin, penicillin, sulfonamide sulfisoxazole, trimethoprim, methionine sulphoximine, methotrexate, puromycine, blasticidin, histidinol, hygromycin, zeocin, bleomycin and neomycin.

### Libraries

[0691] The present disclosure provides for a library of expression vectors comprising donor polynucleotides. In some embodiments, the library can comprise expression vectors comprising polynucleotide sequences encoding for differing genetic elements of interest but the same reporter elements. In some embodiments, the library can comprise expression vectors comprising polynucleotide sequences encoding for differing genetic elements of interest and differing reporter elements. Reporter elements may differ in their nucleic acid targeting sequences (crRNA and tracrRNA). Reporter elements may differ in their reporter genes (e.g. genes encoding fluorescent proteins). The present disclosure provides for methods of using the library to generate a plurality of genetically modified cells. The present disclosure provides for methods of using the library for a high throughput genetic screen. These libraries can allow for analyzing large numbers of individual genes to infer gene function. Libraries can comprise from about 10 individual members to about 10¹² individual members; e.g. a library can comprise from about 10 individual members to about 10² individual members, from about 10² individual members to about 10³ individual members, from about 10³ individual members to about 10⁵ individual members, from about 10⁵ individual members to about 10⁷ individual members, from about 10⁷ individual members to about 10⁹ individual members, or from about 10⁹ individual members to about 10¹² individual members.

### Modifying Cells (Transfection/Infection)

[0692] Methods of disclosure provide for selection of cells comprising the donor polynucleotide. In some embodiments, a method can involve contacting a target nucleic acid or introducing into a cell (or a population of cells) one or more nucleic acids comprising nucleotide sequences encoding a nucleic acid-targeting nucleic acid, a site-directed polypeptide, and/or donor polynucleotide of the disclosure. Methods for introducing a nucleic acid into a cell can include viral or bacteriophage infection, transfection, conjugation, protoplast fusion, lipofection, electroporation, calcium phosphate precipitation, polyethyleneimine (PEI)-mediated transfection, DEAE-dextran mediated transfection, liposome-mediated transfection, particle gun technology, calcium phosphate precipitation, direct micro injection, nanoparticle-mediated nucleic acid delivery, and the like. In some embodiments, contacting a target nucleic acid or introducing into a cell (or a population of cells) one or more nucleic acids may not comprise viral infection. In some embodiments, contacting a target nucleic acid or introducing into a cell (or a population of cells) one or more nucleic acids may not comprise bacteriophage infection. In some embodiments, contacting a target nucleic acid or introducing into a cell (or a population of cells) one or more nucleic acids may not comprise transfection.

### Engineered Nucleic Acid-Targeting Nucleic Acids

### Engineered P-Domains

[0693] A nucleic acid-targeting nucleic acid can be engineered (e.g., comprise modifications). An engineered nucleic acid-targeting nucleic acid can refer to any of the engineered nucleic acid-targeting nucleic acids as described herein. For example, an engineered nucleic acid-targeting nucleic acid can comprise a minimum CRISPR repeat, a minimum tracrRNA, and a 3′ tracrRNA. A P-domain of a nucleic acid-targeting nucleic acid can interact with region of a site-directed polypeptide. A P-domain can interact with a plurality of regions of a site-directed polypeptide. A P-domain can interact with a plurality of regions of a site-directed polypeptide wherein at least one of the regions interacts with a PAM in a protospacer adjacent motif. Examples of these regions can include amino acids 1096-1225, and 1105-1138 of Cas9 in S. pyogenes.

[0694] A modification can be introduced into the P-domain. A P-domain can comprise at least about 1, 2, 3, 4, 5, 6, 7, 8, 9, 10, 15, 20, 25, or 30 or more adjacent nucleotides. A P-domain can comprise at most about 1, 2, 3, 4, 5, 6, 7, 8, 9, 10, 15, 20, 25, or 30 or more adjacent nucleotides. A P-domain can start one nucleotide 3′ of the last paired nucleotide in the duplex comprising the minimum CRISPR repeat and the minimum tracrRNA sequence. A P-domain can start at least about 1, 2, 3, 4, 5, 6,7,8, 9, 10, 15, 20, 25, or 30 or more nucleotides 3′ of the last paired nucleotide in the duplex comprising the minimum CRISPR repeat and the minimum tracrRNA sequence. A P-domain can start at most about 1, 2, 3, 4, 5, 6,7, 8, 9, 10, 15, 20, 25, or 30 or more nucleotides 3′ of the last paired nucleotide in the duplex comprising the minimum CRISPR repeat and the minimum tracrRNA sequence.

[0695] An engineered P-domain can comprise at least about 1, 2, 3, 4, 5, 6, 7, 8, 9, or 10 or more mutations. An engineered P-domain can comprise at most about 1, 2, 3, 4, 5, 6, 7, 8, 9, or 10 or more mutations. The mutations can be adjacent to one another (e.g., sequential). The mutations can be separated from one another. The mutations can be separated by at least about 1, 2, 3, 4, 5, 6, 7, 8, 9, or 10 or more nucleotides. The mutations can be separated by at least about 1, 2, 3, 4, 5, 6, 7, 8, 9, or 10 or more nucleotides. Mutations to a nucleic acid-targeting nucleic acid can comprise insertions, deletions, and substitutions of nucleotides in the nucleic acid-targeting nucleic acid.

[0696] In some instances, an engineered nucleic acid-targeting nucleic acid comprises at most about 1, 2, 3, 4, 5, 6, 7, 8, 9, 10, 11, 12, 13, 14, 15, 16, 17, 18, 19, 20, 21, 22, 23, 24, 25, 26, 27, 28, 29, 30% or more nucleotide identity and/or similarity to a wild-type nucleic acid-targeting nucleic acid. In some instances, an engineered nucleic acid-targeting nucleic acid comprises at least about 1, 2, 3, 4, 5, 6, 7, 8, 9, 10, 11, 12, 13, 14, 15, 16, 17, 18, 19, 20, 21, 22, 23, 24, 25, 26, 27, 28, 29, 30% or more nucleotide identity and/or similarity to a wild-type nucleic acid-targeting nucleic acid.

[0697] In some instances, a CRISPR nucleic acid portion of the engineered nucleic acid-targeting nucleic acid comprises at most about 1, 2, 3, 4, 5, 6, 7, 8, 9, 10, 11, 12, 13, 14, 15, 16, 17, 18, 19, 20, 21, 22, 23, 24, 25, 26, 27, 28, 29, 30% or more nucleotide identity and/or similarity to a wild-type CRISPR nucleic acid. In some instances, a CRISPR nucleic acid portion of the engineered nucleic acid-targeting nucleic acid comprises at least about 1, 2, 3, 4, 5, 6, 7, 8, 9, 10, 11, 12, 13, 14, 15, 16, 17, 18, 19, 20, 21, 22, 23, 24, 25, 26, 27, 28, 29, 30% or more nucleotide identity and/or similarity to a wild-type CRISPR nucleic acid.

[0698] A tracrRNA nucleic acid portion of the engineered nucleic acid-targeting nucleic acid can comprise at most about 1, 2, 3, 4, 5, 6, 7, 8, 9, 10, 11, 12, 13, 14, 15, 16, 17, 18, 19, 20, 21, 22, 23, 24, 25, 26, 27, 28, 29, 30% or more nucleotide identity and/or similarity to a wild-type tracrRNA nucleic acid. A tracrRNA nucleic acid portion of the engineered nucleic acid-targeting nucleic acid can comprise at least about 1, 2, 3, 4, 5, 6, 7, 8, 9, 10, 11, 12, 13, 14, 15, 16, 17, 18, 19, 20, 21, 22, 23, 24, 25, 26, 27, 28, 29, 30% or more nucleotide identity and/or similarity to a wild-type tracrRNA nucleic acid.

[0699] The modifications in the P-domain can be such that the engineered nucleic acid-targeting nucleic acid is newly configured to hybridize to a new PAM sequence in a target nucleic acid. The modification to the P-domain can be complementary to the PAM in the target nucleic acid. The modification to the P-domain can comprise the reverse complement of the PAM in the target nucleic acid. The new PAM can comprise at least about 1, 2, 3, 4, 5, 6, 7, 8, 9 or 10 or more nucleotides. The new PAM can comprise at most about 1, 2, 3, 4, 5, 6, 7, 8, 9 or 10 or more nucleotides. Modifications in the P domain can occur in concert with modifications to a P-domain binding and PAM-binding region of a site-directed polypeptide. These modifications can be compensatory, wherein a modified P-domain is specifically modified to bind to a modified site-directed polypeptide, wherein the modification enables the site-directed polypeptide to bind to the engineered P-domain with greater specificity.

[0700] An engineered P-domain can be engineered to bind to a new PAM (e.g., the engineered P-domain can hybridize to a new PAM). The new PAM (e.g., different PAM), can be bimodal (i.e., a bimodal PAM can comprise two separate regions of the PAM). The two separate regions of a bimodal PAM can be separated by at least about 1, 2, 3, 4, 5, 6, 7, 8, 9, or 10 or more nucleotides. The two separate regions of a bimodal PAM can be separated by at most about 1, 2, 3, 4, 5, 6, 7, 8, 9, or 10 or more nucleotides.

[0701] An engineered P-domain can be engineered to bind to a new PAM (e.g., different PAM), wherein the new PAM is trimodal. A trimodal PAM can comprise three separate regions of a PAM sequence (e.g., three separate regions that can be used in targeting a nucleic acid-targeting nucleic acid to a target nucleic acid). The three separate regions of a trimodal PAM can be separated by at least about 1, 2, 3, 4, 5, 6, 7, 8, 9, or 10 or more nucleotides. The three separate regions of a trimodal PAM can be separated by at most about 1, 2, 3, 4, 5, 6, 7, 8, 9, or 10 or more nucleotides.

[0702] An engineered nucleic acid-targeting nucleic acid can comprise at least two hairpins. A first hairpin can comprise a duplex between the minimum CRISPR repeat and the minimum tracrRNA sequence. The second hairpin can be downstream of the first hairpin. The second hairpin can start at least 1, 2, 3, 4, 5, 6, 7, 8, 9, or 10 or more nucleotides downstream of the last paired nucleotide of the first duplex. The second hairpin can start at most 1, 2, 3, 4, 5, 6, 7, 8, 9, or 10 or more nucleotides downstream of the last paired nucleotide of the first duplex. The second hairpin can comprise an engineered P-domain.

[0703] The engineered P-domain of the second hairpin can be located on one side of the duplex hairpin. The engineered P-domain of the second hairpin can be located on both sides of the duplex hairpin. The engineered P-domain of the second hairpin can comprise at least about 1, 2, 3, 4, 5, 10, or 20% of the nucleotides in the second hairpin. The engineered P-domain of the second hairpin can comprise at most about 1, 2, 3, 4, 5, 10, or 20% of the nucleotides in the second hairpin.

[0704] The second hairpin can comprise a tracrRNA (e.g., the mid-tracrRNA, or 3′ tracrRNA of a nucleic acid-targeting nucleic acid). The second hairpin can comprise at least about 1, 5, 10, 15, 20, 25, 30, 35, 40, 45, or 50% or more identity to a tracrRNA. The second hairpin can comprise at most about 1, 5, 10, 15, 20, 25, 30, 35, 40, 45, or 50% or more identity to a tracrRNA.

[0705] The second hairpin comprising the engineered P-domain can be configured to de-duplex (e.g., melt, unwind). The second hairpin can de-duplex when in contact with a target nucleic acid. The second hairpin can de-duplex when in contact with a protospacer adjacent motif of a target nucleic acid.

[0706] In some instances, an engineered P-domain can be configured to hybridize to a region in a nucleic acid-targeting nucleic acid (e.g., the same nucleic acid-targeting nucleic acid comprising the engineered P-domain), and the engineered P-domain can be configured to hybridize to a target nucleic acid. In other words, the engineered P-domain can comprise a switchable sequence, in which in some instances, the P-domain is hybridized to the nucleic acid-targeting nucleic acid, thereby forming a hairpin, and in some instances the P-domain is hybridized to a PAM in a target nucleic acid.

[0707] An engineered nucleic acid-targeting nucleic acid comprising a modified P-domain can be engineered to bind to a PAM with a lower dissociation constant than a nucleic acid-targeting nucleic acid that does not comprise a modified P-domain (e.g., wild-type nucleic acid-targeting nucleic acid). An engineered nucleic acid-targeting nucleic acid comprising a modified P-domain can be engineered to bind to a PAM with a dissociation constant at least about 10, 50, 100, 150, 200, 250, 300, 350, 400, 450, 500, 550 or 600% or more lower or higher than a nucleic acid-targeting nucleic acid that does not comprise a modified P-domain.

[0708] An engineered nucleic acid-targeting nucleic acid comprising a modified P-domain can be engineered to bind to a PAM with a dissociation constant at most about 10, 50, 100, 150, 200, 250, 300, 350, 400, 450, 500, 550 or 600% or more lower or higher than a nucleic acid-targeting nucleic acid that does not comprise a modified P-domain. An engineered nucleic acid-targeting nucleic acid comprising a modified P-domain can be engineered to bind to a PAM with a dissociation constant at least about 1-fold, 2-fold, 3-fold, 4-fold, 5-fold, 10-fold, 20-fold, 30-fold, 40-fold, or 50-fold or more lower or higher than a nucleic acid-targeting nucleic acid that does not comprise a modified P-domain. An engineered nucleic acid-targeting nucleic acid comprising a modified P-domain can be engineered to bind to a PAM with a dissociation constant at most about 1-fold, 2-fold, 3-fold, 4-fold, 5-fold, 10-fold, 20-fold, 30-fold, 40-fold, or 50-fold or more lower or higher than a nucleic acid-targeting nucleic acid that does not comprise a modified P-domain.

[0709] An engineered nucleic acid-targeting nucleic acid comprising a modified P-domain can be engineered to bind to a PAM with greater specificity than a nucleic acid-targeting nucleic acid that does not comprise a modified P-domain (e.g., wild-type nucleic acid-targeting nucleic acid). Greater specificity can refer to a reduction in off-target binding (e.g., binding of the nucleic acid-targeting nucleic acid to an incorrect PAM or PAM-like sequence). For example, an engineered nucleic acid-targeting nucleic acid comprising a modified P-domain can be engineered to reduce non-specific binding by at least about 10, 50, 100, 150, 200, 250, 300, 350, 400, 450, 500, 550 or 600% or more than a nucleic acid-targeting nucleic acid that does not comprise a modified P-domain. An engineered nucleic acid-targeting nucleic acid comprising a modified P-domain can be engineered to reduce non-specific binding by at most about 10, 50, 100, 150, 200, 250, 300, 350, 400, 450, 500, 550 or 600% or more than a nucleic acid-targeting nucleic acid that does not comprise a modified P-domain. An engineered nucleic acid-targeting nucleic acid comprising a modified P-domain can be engineered to reduce non-specific binding by at least about 1-fold, 2-fold, 3-fold, 4-fold, 5-fold, 10-fold, 20-fold, 30-fold, 40-fold, or 50-fold or than a nucleic acid-targeting nucleic acid that does not comprise a modified P-domain. An engineered nucleic acid-targeting nucleic acid comprising a modified P-domain can be engineered to reduce non-specific binding by at most about 1-fold, 2-fold, 3-fold, 4-fold, 5-fold, 10-fold, 20-fold, 30-fold, 40-fold, or 50-fold or more than a nucleic acid-targeting nucleic acid that does not comprise a modified P-domain.

### Engineered Bulges

[0710] An engineered nucleic acid-targeting nucleic acid can be engineered such that a modification can be introduced into the bulge region of the nucleic acid-targeting nucleic acid. A bulge is a typical nucleic acid feature that comprises unpaired nucleotides. A bulge can comprise unpaired nucleotides on each strand of the duplex that comprises the bulge. In other words, a bulge can comprise an unpaired nucleotide on the minimum CRISPR repeat strand of the duplex and an unpaired nucleotide on the minimum tracrRNA sequence strand of the duplex.

[0711] A bulge can comprise at least about 1, 2, 3, 4, 5, 6, 7, 8, 9 or 10 or more unpaired nucleotides on a first strand of a duplex in a nucleic acid-targeting nucleic acid (i.e., the minimum CRISPR repeat strand of the duplex comprising the minimum CRISPR repeat and minimum tracrRNA sequence). A bulge can comprise at most about 1, 2, 3, 4, 5, 6, 7, 8, 9 or 10 or more unpaired nucleotides on a first strand of a duplex in a nucleic acid-targeting nucleic acid (i.e., the minimum CRISPR repeat strand of the duplex comprising the minimum CRISPR repeat and minimum tracrRNA sequence). A bulge can comprise at least about 1, 2, 3, 4, 5, 6, 7, 8, 9 or 10 or more unpaired nucleotides on a second strand of a duplex in a nucleic acid-targeting nucleic acid (i.e., the minimum tracrRNA sequence strand of the duplex comprising the minimum CRISPR repeat and minimum tracrRNA sequence). A bulge can comprise at most about 1, 2, 3, 4, 5, 6, 7, 8, 9 or 10 or more unpaired nucleotides on a second strand of a duplex in a nucleic acid-targeting nucleic acid (i.e., the minimum tracrRNA sequence strand of the duplex comprising the minimum CRISPR repeat and minimum tracrRNA sequence). A bulge can comprise one unpaired nucleotide on the minimum CRISPR RNA sequence and 3 unpaired nucleotides on the minimum tracrRNA sequence strand.

[0712] The nucleotides adjacent to an unpaired nucleotide can be a nucleotide that forms a wobble base pairing interaction. Wobble base pairing interactions can include guanine-uracil, hypoanthine-uracil, hypoxanthine-adenine, and hypoxanthine-cytosine. At least 1, 2, 3, 4, or 5 or more nucleotides adjacent to an unpaired nucleotide can form a wobble pairing. At most 1, 2, 3, 4, or 5 or more nucleotides adjacent to an unpaired nucleotide can form a wobble pairing.

[0713] An engineered bulge can comprise at least about 1, 2, 3, 4, 5, 6, 7, 8, 9, or 10 or more mutations. An engineered bulge can comprise at most about 1, 2, 3, 4, 5, 6, 7, 8, 9, or 10 or more mutations. The mutations can be adjacent to one another (e.g., sequential). The mutations can be separated from one another. The mutations can be separated by at least about 1, 2, 3, 4, 5, 6, 7, 8, 9, or 10 or more nucleotides. The mutations can be separated by at least about 1, 2, 3, 4, 5, 6, 7, 8, 9, or 10 or more nucleotides. Mutations to a nucleic acid-targeting nucleic acid can comprise insertions, deletions, and substitutions of nucleotides in the nucleic acid-targeting nucleic acid.

[0714] A bulge of an engineered nucleic acid-targeting nucleic acid can comprise at most about 1, 2, 3, 4, 5, 6, 7, 8, 9, 10, 11, 12, 13, 14, 15, 16, 17, 18, 19, 20, 21, 22, 23, 24, 25, 26, 27, 28, 29, 30% or more nucleotide identity and/or similarity to a wild-type nucleic acid-targeting nucleic acid. A bulge of an engineered nucleic acid-targeting nucleic acid can comprise at least about 1, 2, 3, 4, 5, 6, 7, 8, 9, 10, 11, 12, 13, 14, 15, 16, 17, 18, 19, 20, 21, 22, 23, 24, 25, 26, 27, 28, 29, 30% or more nucleotide identity and/or similarity to a wild-type nucleic acid-targeting nucleic acid.

[0715] One strand of the bulge can be mutated and the other strand is not mutated. In other words, in some instances, the sequence of the bulge on the minimum CRISPR RNA strand is the same as a wild-type nucleic acid-targeting nucleic acid, and the sequence of the bulge on the minimum tracrRNA sequence is mutated. In other words, the sequence of the bulge on the minimum CRISPR RNA strand is mutated, and the sequence of the bulge on the minimum tracrRNA sequence is the same as a wild-type nucleic acid-targeting nucleic acid.

[0716] The modifications in the bulge can be such that the engineered nucleic acid-targeting nucleic acid is newly configured to bind to a new site-directed polypeptide. The new site-directed polypeptide can comprise at least about 5, 10, 15, 20, 25, 30, 35, 40, 45 or 50% or more amino acid sequence identity to a wild-type site-directed polypeptide. The new site-directed polypeptide can comprise at most about 5, 10, 15, 20, 25, 30, 35, 40, 45 or 50% or more amino acid sequence identity to a wild-type site-directed polypeptide. The new site-directed polypeptide can be a homologue of Cas9. The new site-directed polypeptide can be an orthologue of Cas9. The new site-directed polypeptide can be a chimera of two different site-directed polypeptides. The new site-directed polypeptide can comprise a mutation as disclosed herein.

[0717] An engineered nucleic acid-targeting nucleic acid comprising a modified bulge can be engineered to bind to a site-directed polypeptide with a lower or higher dissociation constant than a nucleic acid-targeting nucleic acid that does not comprise a modified bulge (e.g., wild-type nucleic acid-targeting nucleic acid). An engineered nucleic acid-targeting nucleic acid comprising a modified bulge can be engineered to bind to a site-directed polypeptide with a dissociation constant at least about 10, 50, 100, 150, 200, 250, 300, 350, 400, 450, 500, 550 or 600% or more lower or higher than a nucleic acid-targeting nucleic acid that does not comprise a modified bulge. An engineered nucleic acid-targeting nucleic acid comprising a modified bulge can be engineered to bind to a site-directed polypeptide with a dissociation constant at most about 10, 50, 100, 150, 200, 250, 300, 350, 400, 450, 500, 550 or 600% or more lower or higher than a nucleic acid-targeting nucleic acid that does not comprise a modified bulge. An engineered nucleic acid-targeting nucleic acid comprising a modified bulge can be engineered to bind to a site-directed polypeptide with a dissociation constant at least about 1-fold, 2-fold, 3-fold, 4-fold, 5-fold, 10-fold, 20-fold, 30-fold, 40-fold, or 50-fold or more lower or higher than a nucleic acid-targeting nucleic acid that does not comprise a modified bulge. An engineered nucleic acid-targeting nucleic acid comprising a modified bulge can be engineered to bind to a site-directed polypeptide with a dissociation constant at most about 1-fold, 2-fold, 3-fold, 4-fold, 5-fold, 10-fold, 20-fold, 30-fold, 40-fold, or 50-fold or more lower or higher than a nucleic acid-targeting nucleic acid that does not comprise a modified bulge.

### Methods

[0718] The disclosure provides for methods for engineering nucleic acid-targeting nucleic acids. The methods can comprise modifying a nucleic acid-targeting nucleic acid. The modifying can comprise inserting, deleting, substituting, and mutating the nucleotides in the nucleic acid-targeting nucleic acid. The modifying can comprise modifying the nucleic acid-targeting nucleic acid such that the nucleic acid-targeting nucleic acid can bind to new protospacer adjacent motifs and/or new site-directed polypeptides as compared to a wild-type nucleic acid-targeting nucleic acid. The method can be performed using any of the site-directed polypeptides, nucleic acid-targeting nucleic acids, and complexes of site-directed polypeptides and nucleic acid-targeting nucleic acids as described herein.

[0719] An engineered nucleic acid-targeting nucleic acid can be used to cleave a target nucleic acid. An engineered nucleic acid-targeting nucleic acid can be introduced into cells with a site-directed polypeptide, thereby forming a complex. The complex can hybridize to a target nucleic acid, wherein the target nucleic acid comprises a protospacer adjacent motif. The site-directed polypeptide of the complex can cleave the target nucleic acid.

[0720] Complementary portions of the nucleic acid sequences of pre-CRISPR nucleic acid and tracr nucleic acid sequences from Streptococcus pyogenes SF370 are shown in FIG. 20.

[0721] FIG. 21 depicts exemplary structure of the duplex (e.g., hairpin) comprising the minimum CRISPR repeat and the minimum tracrRNA sequence and a portion of the 3′ tracrRNA sequence. The duplex comprises a bulge region.

[0722] Table 4 contains the sequences of DNA templates used to synthesize the single guide nucleic acid-targeting nucleic acids of the disclosure.

TABLE 4
DNA templates of the guide nucleic acids of the disclosure
Duplex variants group 1

| TEMP3- | AGTAATAATACGACTCACTATAGGGGGCCACTAGGGACAGGATGT |
|---|---|
| FL | TTTAGAGCTATGCTGTTTTGGAAACAAAACAGCATAGCAAGTTAA |
| | AATAAGGCTAGTCCGTTATCAACTTGAAAAAGTGGCACCGAGTCG |
| | GTGCTTTTTTT (SEQ ID NO: 1374) |
| SGR-v2 | AGTAATAATACGACTCACTATAGGGGGCCACTAGGGACAGGATGA |
| | AAAAGAGCTAGAAATAGCAAGTTTTTTTAAGGCTAGTCCGTTATC |
| | AACTTGAAAAAGTGGCACCGAGTCGGTGCTTTTTTT (SEQ ID NO: |
| | 1375) |
| SGR-v3 | AGTAATAATACGACTCACTATAGGGGGCCACTAGGGACAGGATGA |
| | TATAGAGCTAGAAATAGCAAGTTATATTAAGGCTAGTCCGTTATC |
| | AACTTGAAAAAGTGGCACCGAGTCGGTGCTTTTTTT (SEQ ID NO: |
| | 1376) |
| SGR-v4 | AGTAATAATACGACTCACTATAGGGGGCCACTAGGGACAGGATGT |
| | TTTAGAGGATGAAAATCCAAGTTAAAATAAGGCTAGTCCGTTATC |
| | AACTTGAAAAAGTGGCACCGAGTCGGTGCTTTTTTT (SEQ ID NO: |
| | 1377) |
| SGR-v5 | AGTAATAATACGACTCACTATAGGGGGCCACTAGGGACAGGATGA |
| | AAATGAGGATGAAAATCCAAGTATTTTTAAGGCTAGTCCGTTATC |
| | AACTTGAAAAAGTGGCACCGAGTCGGTGCTTTTTTT (SEQ ID NO: |
| | 1378) |
| SGR-v6 | AGTAATAATACGACTCACTATAGGGGGCCACTAGGGACAGGATGA |
| | TTATGAGGATGAAAATCCAAGTATAATTAAGGCTAGTCCGTTATC |
| | AACTTGAAAAAGTGGCACCGAGTCGGTGCTTTTTTT (SEQ ID NO: |
| | 1379) |
| SGR-v7 | AGTAATAATACGACTCACTATAGGGGGCCACTAGGGACAGGATGT |
| | AATTGAGGATGAAAATCCAAGTAATTATAAGGCTAGTCCGTTATC |
| | AACTTGAAAAAGTGGCACCGAGTCGGTGCTTTTTTT (SEQ ID NO: |
| | 1380) |
| SGR-v8 | AGTAATAATACGACTCACTATAGGGGGCCACTAGGGACAGGATGA |
| | AAATCAAGTGATGAAAATCGAGATTTTTAAGGCTAGTCCGTTATC |
| | AACTTGAAAAAGTGGCACCGAGTCGGTGCTTTTTTT (SEQ ID NO: |
| | 1381) |
| SGR-v9 | AGTAATAATACGACTCACTATAGGGGGCCACTAGGGACAGGATGA |
| | AAATGAAGGATGAAAATCCAGTATTTTTAAGGCTAGTCCGTTATC |
| | AACTTGAAAAAGTGGCACCGAGTCGGTGCTTTTTTT (SEQ ID NO: |
| | 1382) |
| SGR-v10 | AGTAATAATACGACTCACTATAGGGGGCCACTAGGGACAGGATGA |
| | TTTAGAGCTAGAAATAGCAAGTTAAATTAAGGCTAGTCCGTTATC |
| | AACTTGAAAAAGTGGCACCGAGTCGGTGCTTTTTTT (SEQ ID NO: |
| | 1383) |
| SGR-v11 | AGTAATAATACGACTCACTATAGGGGGCCACTAGGGACAGGATGT |
| | CTCAGAGCTAGAAATAGCAAGTTGAGATAAGGCTAGTCCGTTATC |
| | AACTTGAAAAAGTGGCACCGAGTCGGTGCTTTTTTT (SEQ ID NO: |
| | 1384) |
| SGR-v12 | AGTAATAATACGACTCACTATAGGGGGCCACTAGGGACAGGATGT |
| | CCCAGAGCTAGAAATAGCAAGTTGGGATAAGGCTAGTCCGTTATC |
| | AACTTGAAAAAGTGGCACCGAGTCGGTGCTTTTTTT (SEQ ID NO: |
| | 1385) |
| SGR-v13 | AGTAATAATACGACTCACTATAGGGGGCCACTAGGGACAGGATGT |
| | TTTAGACTCAGAAATCAGAAGTTAAAATAAGGCTAGTCCGTTATC |
| | AACTTGAAAAAGTGGCACCGAGTCGGTGCTTTTTTT (SEQ ID NO: |
| | 1386) |

Duplex variants group 2

| | |
|---|---|
| SGR-v14 | AGTAATAATACGACTCACTATAGGGGGCCACTAGGGACAGGATGT |
| | TTTAGAGCTAGAAATAGCTCTAAAATAAGGCTAGTCCGTTATCAA |
| | CTTGAAAAAGTGGCACCGAGTCGGTGCTTTTTTT (SEQ ID NO: 1387) |
| SGR-v15 | AGTAATAATACGACTCACTATAGGGGGCCACTAGGGACAGGATGT |
| | TTTAGAGGAAACTCTAAAATAAGGCTAGTCCGTTATCAACTTGAA |
| | AAAGTGGCACCGAGTCGGTGCTTTTTTT (SEQ ID NO: 1388) |
| SGR-v16 | AGTAATAATACGACTCACTATAGGGGGCCACTAGGGACAGGATGT |
| | TTTAGAAATAAAATAAGGCTAGTCCGTTATCAACTTGAAAAAGTG |
| | GCACCGAGTCGGTGCTTTTTTT (SEQ ID NO: 1389) |
| SGR-v17 | AGTAATAATACGACTCACTATAGGGGGCCACTAGGGACAGGATAT |
| | TTTAGAGCTAGAAATAGCAAGTTAAAATAAGGCTAGTCCGTTATC |
| | AACTTGAAAAAGTGGCACCGAGTCGGTGCTTTTTTT (SEQ ID NO: |
| | 1390) |
| SGR-v18 | AGTAATAATACGACTCACTATAGGGGGCCACTAGGGACAGGATAT |
| | TTTAGAGCTAGAAATAGCAAGTTAAAACAAGGCTAGTCCGTTATC |
| | AACTTGAAAAAGTGGCACCGAGTCGGTGCTTTTTTT (SEQ ID NO: |
| | 1391) |
| SGR-v19 | AGTAATAATACGACTCACTATAGGGGGCCACTAGGGACAGGATGA |
| | CGATAGAACGGAAACGTTGGACATCGTTAAGGCTAGTCCGTTATC |
| | AACTTGAAAAAGTGGCACCGAGTCGGTGCTTTTTTT (SEQ ID NO: |
| | 1392) |
| SGR-v20 | AGTAATAATACGACTCACTATAGGGGGCCACTAGGGACAGGATGA |
| | CGATGAGACGGAAACGTCAAGTATCGTTAAGGCTAGTCCGTTATC |
| | AACTTGAAAAAGTGGCACCGAGTCGGTGCTTTTTTT (SEQ ID NO: |
| | 1393) |
| SGR-v21 | AGTAATAATACGACTCACTATAGGGGGCCACTAGGGACAGGATGT |
| | TTTAAGACTAGAAATAGTGGACTAAAATAAGGCTAGTCCGTTATC |
| | AACTTGAAAAAGTGGCACCGAGTCGGTGCTTTTTTT (SEQ ID NO: |
| | 1394) |
| SGR-v22 | AGTAATAATACGACTCACTATAGGGGGCCACTAGGGACAGGATCG |
| | TTTAGAGCTAGAAATAGCAAGTTAAAATAAGGCTAGTCCGTTATC |
| | AACTTGAAAAAGTGGCACCGAGTCGGTGCTTTTTTT (SEQ ID NO: |
| | 1395) |
| SGR-v23 | AGTAATAATACGACTCACTATAGGGGGCCACTAGGGACAGGATGT |
| | GGTAGAGCTAGAAATAGCAAGTTAAAATAAGGCTAGTCCGTTATC |
| | AACTTGAAAAAGTGGCACCGAGTCGGTGCTTTTTTT (SEQ ID NO: |
| | 1396) |
| SGR-v24 | AGTAATAATACGACTCACTATAGGGGGCCACTAGGGACAGGATGT |
| | TTGCGAGCTAGAAATAGCAAGTTAAAATAAGGCTAGTCCGTTATC |
| | AACTTGAAAAAGTGGCACCGAGTCGGTGCTTTTTTT (SEQ ID NO: |
| | 1397) |
| SGR-v25 | AGTAATAATACGACTCACTATAGGGGGCCACTAGGGACAGGATGT |
| | TTTAGAGTGAGAAATAGCAAGTTCACATAAGGCTAGTCCGTTATC |
| | AACTTGAAAAAGTGGCACCGAGTCGGTGCTTTTTTT (SEQ ID NO: |
| | 1398) |
| SGR-v26 | AGTAATAATACGACTCACTATAGGGGGCCACTAGGGACAGGATGT |
| | TTTAGAGCTAGAAATAGCAAGTTACACTAAGGCTAGTCCGTTATC |
| | AACTTGAAAAAGTGGCACCGAGTCGGTGCTTTTTTT (SEQ ID NO: |
| | 1399) |
| SGR-v27 | AGTAATAATACGACTCACTATAGGGGGCCACTAGGGACAGGATGT |
| | TTTAGAGCTAGAAATAGCAAGTTAACAGAAGGCTAGTCCGTTATC |
| | AACTTGAAAAAGTGGCACCGAGTCGGTGCTTTTTTT (SEQ ID NO: |
| | 1400) |
| SGR-v28 | AGTAATAATACGACTCACTATAGGGGGCCACTAGGGACAGGATGT |
| | TTTAGAGCTAGAAATAGCAAGTTAAAATAACTGGCTAGTCCGTTA |
| | TCAACTTGAAAAAGTGGCACCGAGTCGGTGCTTTTTTT (SEQ ID |
| | NO: 1401) |
| SGR-v29 | AGTAATAATACGACTCACTATAGGGGGCCACTAGGGACAGGATGT |
| | TTTAGAGCTAGAAATAGCAAGTTAAAATGCTAGTCCGTTATCAACT |
| | TGAAAAAGTGGCACCGAGTCGGTGCTTTTTTT (SEQ ID NO: 1402) |

Tracr-Variant Group

| | |
|---|---|
| SGR-v30 | AGTAATAATACGACTCACTATAGGGGGCCACTAGGGACAGGATGT |
| | TTTAGAGCTAGAAATAGCAAGTTAAAATGGAACTAGTCCGTTATC |
| | AACTTGAAAAAGTGGCACCGAGTCGGTGCTTTTTTT (SEQ ID NO: |
| | 1403) |
| SGR-v31 | AGTAATAATACGACTCACTATAGGGGGCCACTAGGGACAGGATGT |
| | TTTAGAGCTAGAAATAGCAAGTTAAAATTTCGCTAGTCCGTTATCA |
| | ACTTGAAAAAGTGGCACCGAGTCGGTGCTTTTTTT (SEQ ID NO: |
| | 1404) |
| SGR-v32 | AGTAATAATACGACTCACTATAGGGGGCCACTAGGGACAGGATGT |
| | TTTAGAGCTAGAAATAGCAAGTTAAAATAAGCGAAGTCCGTTATC |
| | AACTTGAAAAAGTGGCACCGAGTCGGTGCTTTTTTT (SEQ ID NO: |
| | 1405) |
| SGR-v33 | AGTAATAATACGACTCACTATAGGGGGCCACTAGGGACAGGATGT |
| | TTTAGAGCTAGAAATAGCAAGTTAAAATAAGGCTTCACCGTTATC |
| | AACTTGAAAAAGTGGCACCGAGTCGGTGCTTTTTTT (SEQ ID NO: |
| | 1406) |
| SGR-v34 | AGTAATAATACGACTCACTATAGGGGGCCACTAGGGACAGGATGT |
| | TTTAGAGCTAGAAATAGCAAGTTAAAATAAGGCTAGTGGCTTATC |
| | AACTTGAAAAAGTGGCACCGAGTCGGTGCTTTTTTT (SEQ ID NO: |
| | 1407) |
| SGR-v35 | AGTAATAATACGACTCACTATAGGGGGCCACTAGGGACAGGATGT |
| | TTTAGAGCTAGAAATAGCAAGTTAAAATAAGGCTAGTCCGAATTC |
| | AACTTGAAAAAGTGGCACCGAGTCGGTGCTTTTTTT (SEQ ID NO: |
| | 1408) |
| SGR-v36 | AGTAATAATACGACTCACTATAGGGGGCCACTAGGGACAGGATGT |
| | TTTAGAGCTAGAAATAGCAAGTTAAAATAAGGCTAGTCCGTTAAG |
| | TACTTGAAAAAGTGGCACCGAGTCGGTGCTTTTTTT (SEQ ID NO: |
| | 1409) |
| SGR-v37 | AGTAATAATACGACTCACTATAGGGGGCCACTAGGGACAGGATGT |
| | TTTAGAGCTAGAAATAGCAAGTTAAAATAAGGCTAGTCCGTTATC |
| | ATGATGAAAAAGTGGCACCGAGTCGGTGCTTTTTTT (SEQ ID NO: |
| | 1410) |
| SGR-v38- | AGTAATAATACGACTCACTATAGGGGGCCACTAGGGACAGGATGT |
| MMO | TTTAGAGCTAGAAATAGCAAGTTAAAATAAGAATGATACATCACA |
| | AAAAAAAGGCTTTATGCCGTAACTACTACTTATTTTCAAAATAAGT |
| | AGTTTTTTTT (SEQ ID NO: 1411) |
| SGR-v39- | AGTAATAATACGACTCACTATAGGGGGCCACTAGGGACAGGATGT |
| ST2 | TTTAGAGCTAGAAATAGCAAGTTAAAATAAGGCTTCATGCCGAAA |
| | TCAACACCCTGTCATTTTATGGCAGGGTGTTTTCGTTATTTTTTT |
| | (SEQ ID NO: 1412) |
| SGR-v40- | AGTAATAATACGACTCACTATAGGGGGCCACTAGGGACAGGATGT |
| CJ | TTTAGAGCTAGAAATAGCAAGTTAAAATAAAGAGTTTGCGGGACT |
| | CTGCGGGGTTACAATCCCCTAAAACCGCTTTTTTT (SEQ ID NO: |
| | 1413) |
| SGR-v41- | AGTAATAATACGACTCACTATAGGGGGCCACTAGGGACAGGATGT |
| NM | TTTAGAGCTAGAAATAGCAAGTTAAAATAAGGCCGTCTGAAAAGA |
| | TGTGCCGCAACGCTCTGCCCCTTAAAGCTTCTGCTTTAAGGGGCAT |
| | TTTTT (SEQ ID NO: 1414) |

Csy4-tag-group

| | |
|---|---|
| SGR-v42 | AGTAATAATACGACTCACTATAGGGGGCCACTAGGGACAGGATGT |
| | TTTAGAGCTAGAAATAGCAAGTTAAAATAAGGCTAGTCCGTTATC |
| | AACTTATACTGCCGTATAGGCAGAGATTTTTT (SEQ ID NO: 1415) |
| SGR-v43 | AGTAATAATACGACTCACTATAGGGGGCCACTAGGGACAGGATGT |
| | TTTAGAGCTAGAAATAGCAAGTTAAAATAAGGCTAGTCCGTTATC |
| | AACTTATACTGCCGTATAGGCAGAGAAATGGACTCGGAATACTGC |
| | CGTATAGGCAGAGATTTTTT (SEQ ID NO: 1416) |
| SGR-v44 | AGTAATAATACGACTCACTATAGGGGGCCACTAGGGACAGGATGT |
| | TTTAGAGCTATCACTGCCGTATAGGCAGTGATAGCAAGTTAAAAT |
| | AAGGCTAGTCCGTTATCAACTTGAAAAAGTGGCACCGAGTCGGTG |
| | CTTTTTTT (SEQ ID NO: 1417) |
| SGR-v45 | AGTAATAATACGACTCACTATAGGGGGCCACTAGGGACAGGATGT |
| | TTTAGAGCTATCACTGCCGTATAGGCAGTGATAGCAAGTTAAAAT |
| | AAGGCTAGTCCGTTATCAACTTGAAAAAGTGGCACCGAGTCGGTG |
| | CTAATGGACTCGATACTGCCGTATAGGCAGAGATTTTTT (SEQ ID |
| | NO: 1418) |

[0723] Table 4A shows the RNA sequences of the DNA templates in Table 4.

TABLE 4A
RNA sequences of single guide nucleic acid-targeting nucleic
acids of the disclosure.
Single guide nucleic acid-targeting nucleic acid sequence
Duplex variants group 1

| | |
|---|---|
| TEMP3- | GGGGCCACUAGGGACAGGAUGUUUUAGAGCUAUGCUGUUUUGGA |
| FL | AACAAAACAGCAUAGCAAGUUAAAAUAAGGCUAGUCCGUUAUCA |
| | ACUUGAAAAAGUGGCACCGAGUCGGUGCUUUUUUU (SEQ ID NO: |
| | 1419) |
| SGR-v2 | GGGGCCACUAGGGACAGGAUGAAAAAGAGCUAGAAAUAGCAAGU |
| | UUUUUUAAGGCUAGUCCGUUAUCAACUUGAAAAAGUGGCACCGA |
| | GUCGGUGCUUUUUUU (SEQ ID NO: 1420) |
| SGR-v3 | GGGGCCACUAGGGACAGGAUGAUAUAGAGCUAGAAAUAGCAAGU |
| | UAUAUUAAGGCUAGUCCGUUAUCAACUUGAAAAAGUGGCACCGA |
| | GUCGGUGCUUUUUUU (SEQ ID NO: 1421) |
| SGR-v4 | GGGGCCACUAGGGACAGGAUGUUUUAGAGGAUGAAAAUCCAAGU |
| | UAAAAUAAGGCUAGUCCGUUAUCAACUUGAAAAAGUGGCACCGA |
| | GUCGGUGCUUUUUUU (SEQ ID NO: 1422) |
| SGR-v5 | GGGGCCACUAGGGACAGGAUGAAAAUGAGGAUGAAAAUCCAAGU |
| | AUUUUUAAGGCUAGUCCGUUAUCAACUUGAAAAAGUGGCACCGA |
| | GUCGGUGCUUUUUUU (SEQ ID NO: 1423) |
| SGR-v6 | GGGGCCACUAGGGACAGGAUGAUUAUGAGGAUGAAAAUCCAAGU |
| | AUAAUUAAGGCUAGUCCGUUAUCAACUUGAAAAAGUGGCACCGA |
| | GUCGGUGCUUUUUUU (SEQ ID NO: 1424) |
| SGR-v7 | GGGGCCACUAGGGACAGGAUGUAAUUGAGGAUGAAAAUCCAAGU |
| | AAUUAUAAGGCUAGUCCGUUAUCAACUUGAAAAAGUGGCACCGA |
| | GUCGGUGCUUUUUUU (SEQ ID NO: 1425) |
| SGR-v8 | GGGGCCACUAGGGACAGGAUGAAAAUCAAGUGAUGAAAAUCGAG |
| | AUUUUUAAGGCUAGUCCGUUAUCAACUUGAAAAAGUGGCACCGA |
| | GUCGGUGCUUUUUUU (SEQ ID NO: 1426) |
| SGR-v9 | GGGGCCACUAGGGACAGGAUGAAAAUGAAGGAUGAAAAUCCAGU |
| | AUUUUUAAGGCUAGUCCGUUAUCAACUUGAAAAAGUGGCACCGA |
| | GUCGGUGCUUUUUUU (SEQ ID NO: 1427) |
| SGR-v10 | GGGGCCACUAGGGACAGGAUGAUUUAGAGCUAGAAAUAGCAAGU |
| | UAAAUUAAGGCUAGUCCGUUAUCAACUUGAAAAAGUGGCACCGA |
| | GUCGGUGCUUUUUUU (SEQ ID NO: 1428) |
| SGR-v11 | GGGGCCACUAGGGACAGGAUGUCUCAGAGCUAGAAAUAGCAAGU |
| | UGAGAUAAGGCUAGUCCGUUAUCAACUUGAAAAAGUGGCACCGA |
| | GUCGGUGCUUUUUUU (SEQ ID NO: 1429) |
| SGR-v12 | GGGGCCACUAGGGACAGGAUGUCCCAGAGCUAGAAAUAGCAAGU |
| | UGGGAUAAGGCUAGUCCGUUAUCAACUUGAAAAAGUGGCACCGA |
| | GUCGGUGCUUUUUUU (SEQ ID NO: 1430) |
| SGR-v13 | GGGGCCACUAGGGACAGGAUGUUUUAGACUCAGAAAUCAGAAGU |
| | UAAAAUAAGGCUAGUCCGUUAUCAACUUGAAAAAGUGGCACCGA |
| | GUCGGUGCUUUUUUU (SEQ ID NO: 1431) |

Duplex variants group 2

| | |
|---|---|
| SGR-v14 | GGGGCCACUAGGGACAGGAUGUUUUAGAGCUAGAAAUAGCUCUA |
| | AAAUAAGGCUAGUCCGUUAUCAACUUGAAAAAGUGGCACCGAGU |
| | CGGUGCUUUUUUU (SEQ ID NO: 1432) |
| SGR-v15 | GGGGCCACUAGGGACAGGAUGUUUUAGAGGAAACUCUAAAAUAA |
| | GGCUAGUCCGUUAUCAACUUGAAAAAGUGGCACCGAGUCGGUGC |
| | UUUUUUU (SEQ ID NO: 1433) |
| SGR-v16 | GGGGCCACUAGGGACAGGAUGUUUUAGAAAUAAAAUAAGGCUAG |
| | UCCGUUAUCAACUUGAAAAAGUGGCACCGAGUCGGUGCUUUUUU |
| | U (SEQ ID NO: 1434) |
| SGR-v17 | GGGGCCACUAGGGACAGGAUAUUUUAGAGCUAGAAAUAGCAAGU |
| | UAAAAUAAGGCUAGUCCGUUAUCAACUUGAAAAAGUGGCACCGA |
| | GUCGGUGCUUUUUUU (SEQ ID NO: 1435) |
| SGR-v18 | GGGGCCACUAGGGACAGGAUAUUUUAGAGCUAGAAAUAGCAAGU |
| | UAAAACAAGGCUAGUCCGUUAUCAACUUGAAAAAGUGGCACCGA |
| | GUCGGUGCUUUUUUU (SEQ ID NO: 1436) |
| SGR-v19 | GGGGCCACUAGGGACAGGAUGACGAUAGAACGGAAACGUUGGAC |
| | AUCGUUAAGGCUAGUCCGUUAUCAACUUGAAAAAGUGGCACCGA |
| | GUCGGUGCUUUUUUU (SEQ ID NO: 1437) |
| SGR-v20 | GGGGCCACUAGGGACAGGAUGACGAUGAGACGGAAACGUCAAGU |
| | AUCGUUAAGGCUAGUCCGUUAUCAACUUGAAAAAGUGGCACCGA |
| | GUCGGUGCUUUUUUU (SEQ ID NO: 1438) |
| SGR-v21 | GGGGCCACUAGGGACAGGAUGUUUUAAGACUAGAAAUAGUGGAC |
| | UAAAAUAAGGCUAGUCCGUUAUCAACUUGAAAAAGUGGCACCGA |
| | GUCGGUGCUUUUUUU (SEQ ID NO: 1439) |
| SGR-v22 | GGGGCCACUAGGGACAGGAUCGUUUAGAGCUAGAAAUAGCAAGU |
| | UAAAAUAAGGCUAGUCCGUUAUCAACUUGAAAAAGUGGCACCGA |
| | GUCGGUGCUUUUUUU (SEQ ID NO: 1440) |
| SGR-v23 | GGGGCCACUAGGGACAGGAUGUGGUAGAGCUAGAAAUAGCAAGU |
| | UAAAAUAAGGCUAGUCCGUUAUCAACUUGAAAAAGUGGCACCGA |
| | GUCGGUGCUUUUUUU (SEQ ID NO: 1441) |
| SGR-v24 | GGGGCCACUAGGGACAGGAUGUUUGCGAGCUAGAAAUAGCAAGU |
| | UAAAAUAAGGCUAGUCCGUUAUCAACUUGAAAAAGUGGCACCGA |
| | GUCGGUGCUUUUUUU (SEQ ID NO: 1442) |
| SGR-v25 | GGGGCCACUAGGGACAGGAUGUUUUAGAGUGAGAAAUAGCAAGU |
| | UCACAUAAGGCUAGUCCGUUAUCAACUUGAAAAAGUGGCACCGA |
| | GUCGGUGCUUUUUUU (SEQ ID NO: 1443) |
| SGR-v26 | GGGGCCACUAGGGACAGGAUGUUUUAGAGCUAGAAAUAGCAAGU |
| | UACACUAAGGCUAGUCCGUUAUCAACUUGAAAAAGUGGCACCGA |
| | GUCGGUGCUUUUUUU (SEQ ID NO: 1444) |
| SGR-v27 | GGGGCCACUAGGGACAGGAUGUUUUAGAGCUAGAAAUAGCAAGU |
| | UAACAGAAGGCUAGUCCGUUAUCAACUUGAAAAAGUGGCACCGA |
| | GUCGGUGCUUUUUUU (SEQ ID NO: 1445) |
| SGR-v28 | GGGGCCACUAGGGACAGGAUGUUUUAGAGCUAGAAAUAGCAAGU |
| | UAAAAUAACUGGCUAGUCCGUUAUCAACUUGAAAAAGUGGCACC |
| | GAGUCGGUGCUUUUUUU (SEQ ID NO: 1446) |
| SGR-v29 | GGGGCCACUAGGGACAGGAUGUUUUAGAGCUAGAAAUAGCAAGU |
| | UAAAAUGCUAGUCCGUUAUCAACUUGAAAAAGUGGCACCGAGUC |
| | GGUGCUUUUUUU (SEQ ID NO: 1447) |

Tracr-Variant Group

| | |
|---|---|
| SGR-v30 | GGGGCCACUAGGGACAGGAUGUUUUAGAGCUAGAAAUAGCAAGU |
| | UAAAAUGGAACUAGUCCGUUAUCAACUUGAAAAAGUGGCACCGA |
| | GUCGGUGCUUUUUUU (SEQ ID NO: 1448) |
| SGR-v31 | GGGGCCACUAGGGACAGGAUGUUUUAGAGCUAGAAAUAGCAAGU |
| | UAAAAUUUCGCUAGUCCGUUAUCAACUUGAAAAAGUGGCACCGA |
| | GUCGGUGCUUUUUUU (SEQ ID NO: 1449) |
| SGR-v32 | GGGGCCACUAGGGACAGGAUGUUUUAGAGCUAGAAAUAGCAAGU |
| | UAAAAUAAGCGAAGUCCGUUAUCAACUUGAAAAAGUGGCACCGA |
| | GUCGGUGCUUUUUUU (SEQ ID NO: 1450) |
| SGR-v33 | GGGGCCACUAGGGACAGGAUGUUUUAGAGCUAGAAAUAGCAAGU |
| | UAAAAUAAGGCUUCACCGUUAUCAACUUGAAAAAGUGGCACCGA |
| | GUCGGUGCUUUUUUU (SEQ ID NO: 1451) |
| SGR-v34 | GGGGCCACUAGGGACAGGAUGUUUUAGAGCUAGAAAUAGCAAGU |
| | UAAAAUAAGGCUAGUGGCUUAUCAACUUGAAAAAGUGGCACCGA |
| | GUCGGUGCUUUUUUU (SEQ ID NO: 1452) |
| SGR-v35 | GGGGCCACUAGGGACAGGAUGUUUUAGAGCUAGAAAUAGCAAGU |
| | UAAAAUAAGGCUAGUCCGAAUUCAACUUGAAAAAGUGGCACCGA |
| | GUCGGUGCUUUUUUU (SEQ ID NO: 1453) |
| SGR-v36 | GGGGCCACUAGGGACAGGAUGUUUUAGAGCUAGAAAUAGCAAGU |
| | UAAAAUAAGGCUAGUCCGUUAAGUACUUGAAAAAGUGGCACCGA |
| | GUCGGUGCUUUUUUU (SEQ ID NO: 1454) |
| SGR-v37 | GGGGCCACUAGGGACAGGAUGUUUUAGAGCUAGAAAUAGCAAGU |
| | UAAAAUAAGGCUAGUCCGUUAUCAUGAUGAAAAAGUGGCACCGA |
| | GUCGGUGCUUUUUUU (SEQ ID NO: 1455) |
| SGR- | GGGGCCACUAGGGACAGGAUGUUUUAGAGCUAGAAAUAGCAAGU |
| v38- | UAAAAUAAGAAUGAUACAUCACAAAAAAAAGGCUUUAUGCCGUA |
| MMO | ACUACUACUUAUUUUCAAAAUAAGUAGUUUUUUUU (SEQ ID NO: |
| | 1456) |
| SGR- | GGGGCCACUAGGGACAGGAUGUUUUAGAGCUAGAAAUAGCAAGU |
| v39-ST2 | UAAAAUAAGGCUUCAUGCCGAAAUCAACACCCUGUCAUUUUAUG |
| | GCAGGGUGUUUUCGUUAUUUUUUU (SEQ ID NO: 1457) |
| SGR- | GGGGCCACUAGGGACAGGAUGUUUUAGAGCUAGAAAUAGCAAGU |
| v40-CJ | UAAAAUAAAGAGUUUGCGGGACUCUGCGGGGUUACAAUCCCCUA |
| | AAACCGCUUUUUUU (SEQ ID NO: 1458) |
| SGR- | GGGGCCACUAGGGACAGGAUGUUUUAGAGCUAGAAAUAGCAAGU |
| v41-NM | UAAAAUAAGGCCGUCUGAAAAGAUGUGCCGCAACGCUCUGCCCC |
| | UUAAAGCUUCUGCUUUAAGGGGCAUUUUUU (SEQ ID NO: 1459) |

Csy4-tag-group

| | |
|---|---|
| SGR-v42 | GGGGCCACUAGGGACAGGAUGUUUUAGAGCUAGAAAUAGCAAGU |
| | UAAAAUAAGGCUAGUCCGUUAUCAACUUAUACUGCCGUAUAGGC |
| | AGAGAUUUUUU (SEQ ID NO: 1460) |
| SGR-v43 | GGGGCCACUAGGGACAGGAUGUUUUAGAGCUAGAAAUAGCAAGU |
| | UAAAAUAAGGCUAGUCCGUUAUCAACUUAUACUGCCGUAUAGGC |
| | AGAGAAAUGGACUCGGAAUACUGCCGUAUAGGCAGAGAUUUUUU |
| | (SEQ ID NO: 1461) |
| SGR-v44 | GGGGCCACUAGGGACAGGAUGUUUUAGAGCUAUCACUGCCGUAU |
| | AGGCAGUGAUAGCAAGUUAAAAUAAGGCUAGUCCGUUAUCAACU |
| | UGAAAAAGUGGCACCGAGUCGGUGCUUUUUUU (SEQ ID NO: 1462) |
| SGR-v45 | GGGGCCACUAGGGACAGGAUGUUUUAGAGCUAUCACUGCCGUAU |
| | AGGCAGUGAUAGCAAGUUAAAAUAAGGCUAGUCCGUUAUCAACU |
| | UGAAAAAGUGGCACCGAGUCGGUGCUAAUGGACUCGAUACUGCC |
| | GUAUAGGCAGAGAUUUUUU (SEQ ID NO: 1463) |

[0724] Table 5 indicates the activity and purpose of additional nucleic acid-targeting nucleic acid variants. + refers to active. − refers to inactive. The experimental data of these variants is shown in FIG. 37.

TABLE 5
Nucleic acid-targeting nucleic acid variants and their activity

| name | dCB ### | Activity | Purpose | Spacer | sgBackbone |
|---|---|---|---|---|---|
| SGR- | | − | Linker | GGGGCCAC | GTTTTAGAGCTAGAAATAG |
| v80 | | | length | TAGGGACA | CAAGTTAAAATAACTCGGC |
| | | | | GGAT (SEQ | TAGTCCGTTATCAACTTGA |
| | | | | ID NO: 1464) | AAAAGTGGCACCGAGTCGG |
| | | | | | TGCT (SEQ ID NO: 1465) |
| SGR- | | − | Linker | GGGGCCAC | GTTTTAGAGCTAGAAATAG |
| v81 | | | length | TAGGGACA | CAAGTTAAAATAACTCTGG |
| | | | | GGAT (SEQ | CTAGTCCGTTATCAACTTG |
| | | | | ID NO: 1464) | AAAAAGTGGCACCGAGTCG |
| | | | | | GTGCT (SEQ ID NO: 1466) |
| SGR- | | − | Linker | GGGGCCAC | GTTTTAGAGCTAGAAATAG |
| v82 | | | length | TAGGGACA | CAAGTTAAAATAACTCTCT |
| | | | | GGAT (SEQ | GGCTAGTCCGTTATCAACT |
| | | | | ID NO: 1464) | TGAAAAAGTGGCACCGAGT |
| | | | | | CGGTGCT (SEQ ID NO: 1467) |
| SGR- | | ++ | Control | GGGGCCAC | GTTTTAGAGCTAGAAATAG |
| v83 | | | | TAGGGACA | CAAGTTAAAATAAGGCTAG |
| | | | | GGAT (SEQ | TCCGTTATCAACTTGAAAA |
| | | | | ID NO: 1464) | AGTGGCACCGAGTCGGTGC |
| | | | | | T (SEQ ID NO: 1468) |
| SGR- | | ++ | Minimal | GGGGCCAC | GTTTTAGAGGAAACAAGTT |
| v84 | | | sgRNA | TAGGGACA | AAAATAAGGCTAGTCCGTT |
| | | | | GGAT (SEQ | ATCAACTTGAAAAAGTGGC |
| | | | | ID NO: 1464) | ACCGAGTCGGTGCT (SEQ ID |
| | | | | | NO: 1469) |
| SGR- | | ++ | Minimal | GGGGCCAC | GTTTTAGAGACAAGTTAAA |
| v85 | | | sgRNA | TAGGGACA | ATAAGGCTAGTCCGTTATC |
| | | | | GGAT (SEQ | AACTTGAAAAAGTGGCACC |
| | | | | ID NO: 1464) | GAGTCGGTGCT (SEQ ID NO: |
| | | | | | 1470) |
| SGR- | | ++ | Minimal | GGGGCCAC | GTTTTAGGAGAAACTTTAA |
| v86 | | | sgRNA | TAGGGACA | AATAAGGCTAGTCCGTTAT |
| | | | | GGAT (SEQ | CAACTTGAAAAAGTGGCAC |
| | | | | ID NO: 1464) | CGAGTCGGTGCT (SEQ ID |
| | | | | | NO: 1471) |
| SGR- | | − | Minimal | GGGGCCAC | GTTTTATCGAAATCTAAAA |
| v87 | | | sgRNA | TAGGGACA | TAAGGCTAGTCCGTTATCA |
| | | | | GGAT (SEQ | ACTTGAAAAAGTGGCACCG |
| | | | | ID NO: 1464) | AGTCGGTGCT (SEQ ID NO: |
| | | | | | 1472) |
| SGR- | | − | Minimal | GGGGCCAC | GTTTTACTTCGGTAAAATA |
| v88 | | | sgRNA | TAGGGACA | AGGCTAGTCCGTTATCAAC |
| | | | | GGAT (SEQ | TTGAAAAAGTGGCACCGAG |
| | | | | ID NO: 1464) | TCGGTGCT (SEQ ID NO: |
| | | | | | 1473) |
| SGR- | | ++ | Minimal | GGGGCCAC | GTTTTAGATACTTAAAATA |
| v89 | | | sgRNA | TAGGGACA | AGGCTAGTCCGTTATCAAC |
| | | | | GGAT (SEQ | TTGAAAAAGTGGCACCGAG |
| | | | | ID NO: 1464) | TCGGTGCT (SEQ ID NO: |
| | | | | | 1474) |
| SGR- | | − | Minimal | GGGGCCAC | GTTTTATGAAACTAAAATA |
| v90 | | | sgRNA | TAGGGACA | AGGCTAGTCCGTTATCAAC |
| | | | | GGAT (SEQ | TTGAAAAAGTGGCACCGAG |
| | | | | ID NO: 1464) | TCGGTGCT (SEQ ID NO: |
| | | | | | 1475) |
| SGR- | | − | Minimal | GGGGCCAC | GTTTCTTCGGAAATAAGGC |
| v91 | | | sgRNA | TAGGGACA | TAGTCCGTTATCAACTTGA |
| | | | | GGAT (SEQ | AAAAGTGGCACCGAGTCGG |
| | | | | ID NO: 1464) | TGCT (SEQ ID NO: 1476) |
| SGR- | | ++ | Change | GGGGCCAC | GTTTTAGGCTAGAAATAGC |
| v92 | | | bulge | TAGGGACA | AAGTTAAAATAAGGCTAGT |
| | | | angle | GGAT (SEQ | CCGTTATCAACTTGAAAAA |
| | | | | ID NO: 1464) | GTGGCACCGAGTCGGTGCT |
| | | | | | (SEQ ID NO: 1477) |
| SGR- | | ++ | Change | GGGGCCAC | GTTTTAGCTAGAAATAGCA |
| v93 | | | bulge | TAGGGACA | AGTTAAAATAAGGCTAGTC |
| | | | angle | GGAT (SEQ | CGTTATCAACTTGAAAAAG |
| | | | | ID NO: 1464) | TGGCACCGAGTCGGTGCT |
| | | | | | (SEQ ID NO: 1478) |
| SGR- | | ++ | Change | GGGGCCAC | GTTTTACTAGAAATAGCAA |
| v94 | | | bulge | TAGGGACA | GTTAAAATAAGGCTAGTCC |
| | | | angle | GGAT (SEQ | GTTATCAACTTGAAAAAGT |
| | | | | ID NO: 1464) | GGCACCGAGTCGGTGCT |
| | | | | | (SEQ ID NO: 1479) |
| SGR- | | − | Change | GGGGCCAC | GTTTTAGAGCTAGAAATAG |
| v95 | | | bulge | TAGGGACA | CAGTTAAAATAAGGCTAGT |
| | | | angle | GGAT (SEQ | CCGTTATCAACTTGAAAAA |
| | | | | ID NO: 1464) | GTGGCACCGAGTCGGTGCT |
| | | | | | (SEQ ID NO: 1480) |
| SGR- | | − | Change | GGGGCCAC | GTTTTAGAGCTAGAAATAG |
| v96 | | | bulge | TAGGGACA | AGTTAAAATAAGGCTAGTC |
| | | | angle | GGAT (SEQ | CGTTATCAACTTGAAAAAG |
| | | | | ID NO: 1464) | TGGCACCGAGTCGGTGCT |
| | | | | | (SEQ ID NO: 1481) |
| SGR- | | ++ | Change | GGGGCCAC | GTTTTAGAGCTAGAAATAA |
| v97 | | | bulge | TAGGGACA | GTTAAAATAAGGCTAGTCC |
| | | | angle | GGAT (SEQ | GTTATCAACTTGAAAAAGT |
| | | | | ID NO: 1464) | GGCACCGAGTCGGTGCT |
| | | | | | (SEQ ID NO: 1482) |
| SGR- | | − | Change | GGGGCCAC | GTTTTAGAGCTAGAAATAG |
| v98 | | | bulge | TAGGGACA | TTAAAATAAGGCTAGTCCG |
| | | | angle | GGAT (SEQ | TTATCAACTTGAAAAAGTG |
| | | | | ID NO: 1464) | GCACCGAGTCGGTGCT |
| | | | | | (SEQ ID NO: 1483) |
| SGR- | | − | Control | GGGGCCAC | GTTTTAGAGCTAGAAATAG |
| v99 | | | | TAGGGACA | CAAGTTAAAATAAGGCTAG |
| | | | | GGAT (SEQ | TCCGTTATCAACTTGAAAA |
| | | | | ID NO: 1464) | AGTGGCACCGAGTCGGTGC |
| | | | | | T (SEQ ID NO: 1468) |
| SGR- | dCB154 | − | nexus/ | GGGGCCAC | GTTTTAGAGCTAGAAATAG |
| v124 | | | hairpin | TAGGGACA | CAAGTTAAAATAACCCTAG |
| | | | variant | GGAT (SEQ | TCCGTTATCAACTTGAAAA |
| | | | | ID NO: 1464) | AGTGGCACCGAGTCGGTGC |
| | | | | | T (SEQ ID NO: 1484) |
| SGR- | dCB155 | +/− | nexus/ | GGGGCCAC | GTTTTAGAGCTAGAAATAG |
| v125 | | | hairpin | TAGGGACA | CAAGTTAAAATAACCCTAG |
| | | | variant | GGAT (SEQ | TGGGTTATCAACTTGAAAA |
| | | | | ID NO: 1464) | AGTGGCACCGAGTCGGTGC |
| | | | | | T (SEQ ID NO: 1485) |
| SGR- | dCB156 | + | nexus/ | GGGGCCAC | GTTTTAGAGCTAGAAATAG |
| v126 | | | hairpin | TAGGGACA | CAAGTTAAAATAAGGCTAG |
| | | | variant | GGAT (SEQ | TGGGTTATCAACTTGAAAA |
| | | | | ID NO: 1464) | AGTGGCACCGAGTCGGTGC |
| | | | | | T (SEQ ID NO: 1486) |
| SGR- | dCB157 | ++ | nexus/ | GGGGCCAC | GTTTTAGAGCTAGAAATAG |
| v46 | | | hairpin | TAGGGACA | CAAGTTAAAATAAGGCTAG |
| | | | variant | GGAT (SEQ | TAAGTTATCAACTTGAAAA |
| | | | | ID NO: 1464) | AGTGGCACCGAGTCGGTGC |
| | | | | | T (SEQ ID NO: 1487) |
| SGR- | dCB158 | ++ | nexus/ | GGGGCCAC | GTTTTAGAGCTAGAAATAG |
| v47 | | | hairpin | TAGGGACA | CAAGTTAAAATAAGGCTAG |
| | | | variant | GGAT (SEQ | TTTGTTATCAACTTGAAAA |
| | | | | ID NO: 1464) | AGTGGCACCGAGTCGGTGC |
| | | | | | T (SEQ ID NO: 1488) |
| SGR- | dCB159 | ++ | nexus/ | GGGGCCAC | GTTTTAGAGCTAGAAATAG |
| v48 | | | hairpin | TAGGGACA | CAAGTTAAAATAAGACTAG |
| | | | variant | GGAT (SEQ | TTCGTTATCAACTTGAAAA |
| | | | | ID NO: 1464) | AGTGGCACCGAGTCGGTGC |
| | | | | | T (SEQ ID NO: 1489) |
| SGR- | dCB160 | − | nexus/ | GGGGCCAC | GTTTTAGAGCTAGAAATAG |
| v49 | | | hairpin | TAGGGACA | CAAGTTAAAATAAGGCTAG |
| | | | variant | GGAT (SEQ | GAAACTAGCCTTCTCAA |
| | | | | ID NO: 1464) | (SEQ ID NO: 1490) |
| SGR- | dCB161 | − | nexus/ | GGGGCCAC | GTTTTAGAGCTAGAAATAG |
| v50 | | | hairpin | TAGGGACA | CAAGTTAAAATAAGGCTAG |
| | | | variant | GGAT (SEQ | GAAACTAGCCCTCAATA |
| | | | | ID NO: 1464) | (SEQ ID NO: 1491) |
| SGR- | dCB162 | +/− | nexus/ | GGGGCCAC | GTTTTAGAGCTAGAAATAG |
| v51 | | | hairpin | TAGGGACA | CAAGTTAAAATAAGGCTAG |
| | | | variant | GGAT (SEQ | TCCGTAGAAAATGCC (SEQ |
| | | | | ID NO: 1464) | ID NO: 1492) |
| SGR- | dCB163 | + | nexus/ | GGGGCCAC | GTTTTAGAGCTAGAAATAG |
| v52 | | | hairpin | TAGGGACA | CAAGTTAAAATAAGGCTAG |
| | | | variant | GGAT (SEQ | TCCGTAGAAATACGG (SEQ |
| | | | | ID NO: 1464) | ID NO: 1493) |
| SGR- | dCB164 | + | nexus/ | GGGGCCAC | GTTTTAGAGCTAGAAATAG |
| v53 | | | hairpin | TAGGGACA | CAAGTTAAAATAAGGCTAG |
| | | | variant | GGAT (SEQ | TCCGTAGAAATACTTAT |
| | | | | ID NO: 1464) | (SEQ ID NO: 1494) |
| SGR- | dCB165 | + | nexus/ | GGGGCCAC | GTTTTAGAGCTAGAAATAG |
| v54 | | | hairpin | TAGGGACA | CAAGTTAAAATAAGGCTAG |
| | | | variant | GGAT (SEQ | TCCGTTATTATTAGGGGGTT |
| | | | | ID NO: 1464) | A (SEQ ID NO: 1495) |
| SGR- | dCB166 | − | nexus | GGGGCCAC | GTTTTAGAGCTAGAAATAG |
| v55 | | | truncation | TAGGGACA | CAAGTTAAAATAAGG (SEQ |
| | | | | GGAT (SEQ | ID NO: 1496) |
| | | | | ID NO: 1464) | |
| SGR- | dCB167 | − | nexus | GGGGCCAC | GTTTTAGAGCTAGAAATAG |
| v56 | | | truncation | TAGGGACA | CAAGTTAAAATAAGGCTAG |
| | | | | GGAT (SEQ | (SEQ ID NO: 1497) |
| | | | | ID NO: 1464) | |
| SGR- | dCB168 | +/− | nexus | GGGGCCAC | GTTTTAGAGCTAGAAATAG |
| v57 | | | truncation | TAGGGACA | CAAGTTAAAATAAGGCTAG |
| | | | | GGAT (SEQ | TCCG (SEQ ID NO: 1498) |
| | | | | ID NO: 1464) | |
| SGR- | dCB169 | +/− | nexus | GGGGCCAC | GTTTTAGAGCTAGAAATAG |
| v58 | | | truncation | TAGGGACA | CAAGTTAAAATAAGGCTAG |
| | | | | GGAT (SEQ | TCCGTTAT (SEQ ID NO: |
| | | | | ID NO: 1464) | 1499) |
| SGR- | | +/− | nexus | GGGGCCAC | GTTTTAGAGCTAGAAATAG |
| v100 | | | stem | TAGGGACA | CAAGTTAAAATAAGGGCTA |
| | | | length | GGAT (SEQ | GTCCCGTTATCAACTTGAA |
| | | | | ID NO: 1464) | AAAGTGGCACCGAGTCGGT |
| | | | | | GCT (SEQ ID NO: 1500) |
| SGR- | | ++ | nexus | GGGGCCAC | GTTTTAGAGCTAGAAATAG |
| v101 | | | stem | TAGGGACA | CAAGTTAAAATAAGGGGCT |
| | | | length | GGAT (SEQ | AGTCCCCGTTATCAACTTG |
| | | | | ID NO: 1464) | AAAAAGTGGCACCGAGTCG |
| | | | | | GTGCT (SEQ ID NO: 1501) |
| SGR- | | + | nexus | GGGGCCAC | GTTTTAGAGCTAGAAATAG |
| v102 | | | stem | TAGGGACA | CAAGTTAAAATAAGGGGGC |
| | | | length | GGAT (SEQ | TAGTCCCCCGTTATCAACTT |
| | | | | ID NO: 1464) | GAAAAAGTGGCACCGAGTC |
| | | | | | GGTGCT (SEQ ID NO: 1502) |
| SGR- | | ++ | nexus | GGGGCCAC | GTTTTAGAGCTAGAAATAG |
| v103 | | | stem | TAGGGACA | CAAGTTAAAATAAAACTAG |
| | | | length | GGAT (SEQ | TTTGTTATCAACTTGAAAA |
| | | | | ID NO: 1464) | AGTGGCACCGAGTCGGTGC |
| | | | | | T (SEQ ID NO: 1503) |
| SGR- | | ++ | nexus | GGGGCCAC | GTTTTAGAGCTAGAAATAG |
| v104 | | | stem | TAGGGACA | CAAGTTAAAATAAGGACTA |
| | | | length | GGAT (SEQ | GTTCCGTTATCAACTTGAA |
| | | | | ID NO: 1464) | AAAGTGGCACCGAGTCGGT |
| | | | | | GCT (SEQ ID NO: 1504) |
| SGR- | | ++ | Control | GGGGCCAC | GTTTTAGAGCTAGAAATAG |
| v105 | | | | TAGGGACA | CAAGTTAAAATAAGGCTAG |
| | | | | GGAT (SEQ | TCCGTTATCAACTTGAAAA |
| | | | | ID NO: 1464) | AGTGGCACCGAGTCGGTGC |
| | | | | | T (SEQ ID NO: 1468) |
| SGR- | | +/− | nexus | GGGGCCAC | GTTTTAGAGCTAGAAATAG |
| v106 | | | stem | TAGGGACA | CAAGTTAAAATAAGGCTAG |
| | | | length | GGAT (SEQ | TCCTGTTATCAACTTGAAA |
| | | | | ID NO: 1464) | AAGTGGCACCGAGTCGGTG |
| | | | | | CT (SEQ ID NO: 1505) |
| SGR- | | ++ | nexus | GGGGCCAC | GTTTTAGAGCTAGAAATAG |
| v107 | | | stem | TAGGGACA | CAAGTTAAAATAAAGCTAG |
| | | | length | GGAT (SEQ | TCTGTTATCAACTTGAAAA |
| | | | | ID NO: 1464) | AGTGGCACCGAGTCGGTGC |
| | | | | | T (SEQ ID NO: 1506) |
| SGR- | | − | nexus | GGGGCCAC | GTTTTAGAGCTAGAAATAG |
| v108 | | | loop size | TAGGGACA | CAAGTTAAAATAAGGTCTA |
| | | | | GGAT (SEQ | GTCCCGTTATCAACTTGAA |
| | | | | ID NO: 1464) | AAAGTGGCACCGAGTCGGT |
| | | | | | GCT (SEQ ID NO: 1507) |
| SGR- | | + | nexus | GGGGCCAC | GTTTTAGAGCTAGAAATAG |
| v109 | | | loop size | TAGGGACA | CAAGTTAAAATAAGGTACT |
| | | | | GGAT (SEQ | AGTCGCCGTTATCAACTTG |
| | | | | ID NO: 1464) | AAAAAGTGGCACCGAGTCG |
| | | | | | GTGCT (SEQ ID NO: 1508) |
| SGR- | | − | nexus | GGGGCCAC | GTTTTAGAGCTAGAAATAG |
| v110 | | | loop size | TAGGGACA | CAAGTTAAAATAAGGTATC |
| | | | | GGAT (SEQ | TAGTGCGCCGTTATCAACT |
| | | | | ID NO: 1464) | TGAAAAAGTGGCACCGAGT |
| | | | | | CGGTGCT (SEQ ID NO: 1509) |
| SGR- | | ++ | Control | GGGGCCAC | GTTTTAGAGCTAGAAATAG |
| v111 | | | | TAGGGACA | CAAGTTAAAATAAGGCTAG |
| | | | | GGAT (SEQ | TCCGTTATCAACTTGAAAA |
| | | | | ID NO: 1464) | AGTGGCACCGAGTCGGTGC |
| | | | | | T (SEQ ID NO: 1468) |
| SGR- | | − | Tracr | GGGGCCAC | GTTTTAGAGCTAGAAATAG |
| v112 | | | hybrid- | TAGGGACA | CAAGTTAAAATCAAACAAA |
| | | | LRH | GGAT (SEQ | GCTTCAGCTGAGTTTCAATT |
| | | | | ID NO: 1464) | TCTGGCCCATGTTGGGCAC |
| | | | | | ATACATATGCCACCGAG |
| | | | | | (SEQ ID NO: 1510) |
| SGR- | | ++ | Tracr | GGGGCCAC | GTTTTAGAGCTAGAAATAG |
| v113 | | | hybrid- | TAGGGACA | CAAGTTAAAATAAGGCAGT |
| | | | SM159 | GGAT (SEQ | GATTTTTAATCCAGTCCGTA |
| | | | | ID NO: 1464) | CACAACTTGAAAAAGTGCG |
| | | | | | CACCGATTCGGTGCTTTTTT |
| | | | | | (SEQ ID NO: 1511) |
| SGR- | | ++ | Tracr | GGGGCCAC | GTTTTAGAGCTAGAAATAG |
| v114 | | | hybrid- | TAGGGACA | CAAGTTAAAATAAGGCTTA |
| | | | ST3 | GGAT (SEQ | GACCGTACTCAACTTGAAA |
| | | | | ID NO: 1464) | AGGTGGCACCGATTCGGTG |
| | | | | | TTTTTTTT (SEQ ID NO: 1512) |
| SGR- | | ++ | Tracr | GGGGCCAC | GTTTTAGAGCTAGAAATAG |
| v115 | | | hybrid- | TAGGGACA | CAAGTTAAAATCAAAGCGC |
| | | | | GGAT (SEQ | TTTGCGCGGAGTTTCAACTT |
| | | | LBU | ID NO: 1464) | TT (SEQ ID NO: 1513) |
| SGR- | | − | Major | GGGGCCAC | GAGAATCTCCTAGAAATAG |
| v120 | | | variant | TAGGGACA | CTCTTATTCTTAAGGGATCA |
| | | | | GGAT (SEQ | CCGAATACAACTTGAAAAA |
| | | | | ID NO: 1464) | GTGGCACCGAGTCGGTGCT |
| | | | | | (SEQ ID NO: 1514) |
| SGR- | | ++ | Major | GGGGCCAC | GACGATGAGACGGAAACGT |
| v121 | | | variant | TAGGGACA | CAAGTATCGTTAAGGGATC |
| | | | | GGAT (SEQ | ACCGAATACAACTTGAAAA |
| | | | | ID NO: 1464) | AGTGGCACCGAGTCGGTGC |
| | | | | | T (SEQ ID NO: 1515) |
| SGR- | | − | Major | GGGGCCAC | AACGATGAGACGGAAACGT |
| v122 | | | variant | TAGGGACA | CAAGTATCGTCAAGGGATC |
| | | | | GGAT (SEQ | ACCCAATACAACTTGAAAA |
| | | | | ID NO: 1464) | AGTGGCACCGAGTCGGTGC |
| | | | | | T (SEQ ID NO: 1516) |
| SGR- | | − | Major | GGGGCCAC | AACGGTGAGGTGGAAACAC |
| v123 | | | variant | TAGGGACA | CAAGTACCGTCAAGGTAGC |
| | | | | GGAT (SEQ | ACCCGACAAGTC (SEQ ID |
| | | | | ID NO: 1464) | NO: 1517) |

### Methods for the Generation of Tagged Cell Lines Using a Nucleic Acid-Targeting Nucleic Acid

[0725] The methods of the disclosure provide for tagging a cell with a donor polynucleotide, wherein the donor polynucleotide can divide and/or differentiate, and the donor polynucleotide can be transmitted to each daughter cell during cell division. The method can be performed using any of the site-directed polypeptides, nucleic acid-targeting nucleic acids, and complexes of site-directed polypeptides and nucleic acid-targeting nucleic acids as described herein.

[0726] A tagged cell can be generated by contacting the cell with a donor polynucleotide, and a complex comprising a site-directed polypeptide and a nucleic acid-targeting nucleic acid. The donor polynucleotide can be inserted into the cleaved target nucleic acid, thereby generating a tagged cell. The tagged cell can be propagated such as in a cell line, or to produce a propagated population of cells.

[0727] A donor polynucleotide can be introduced into the cut site by use of a donor cassette for homologous recombination that comprises ends homologous to sequences on either side of the double-strand break. The donor polynucleotide can comprise an additional sequence between the two ends. The additional sequence can be a nucleic acid sequence. The additional sequence can encode for a gene. The additional sequence can encode for a non-coding nucleic acid element.

[0728] The donor polynucleotide (e.g., the additional sequence of a donor polynucleotide between two homologous ends) can comprise a marker. A marker can comprise a visualization marker (e.g., a fluorescent marker such as GFP). A marker can comprise a random polynucleotide sequence (e.g., such as a random hexamer sequence). A marker can be a barcode.

[0729] NHEJ can introduce unique sequence signature at each cut site. The repair mechanism can result in the introduction of insertions (e.g., insertion of a donor polynucleotide), deletions or mutations into a cut site. A cell that undergoes NHEJ to repair a double-strand break can comprise a unique sequence after repair has taken place (e.g., a unique sequence can be inserted into the double-strand break). If more than one site is cut within a cell, repair can introduce the donor polynucleotide at each site, thereby adding sequence diversity to that cell. The repaired site can provide a unique barcode sequence to the cell that can be preserved during cell division and passed on to all progeny of the modified cell. A donor polynucleotide can be inserted into at least about 1, 2, 3, 4, 5, 6, 7, 8, 9 or 10 or more sites (e.g, cleaved target nucleic acids). A donor polynucleotide can be inserted into at most about 1, 2, 3, 4, 5, 6, 7, 8, 9 or 10 or more sites (e.g, cleaved target nucleic acids).

[0730] Homologous recombination (HR) can be used to introduce barcode sequences into a cell and/or a cell population (e.g., a human cell, a mammalian cell, a yeast, a fungi, a protozoa, an archaea). A library of donor plasmids (e.g., comprising the donor polynucleotide) can be prepared with randomized sequences in the donor cassette. The library can be made from oligonucleotides, a piece of double-stranded DNA, a plasmid, and/or a minicircle.

[0731] Donor polynucleotide sequences can be introduced into the genomes of individual cells for the purpose of tracking cell lineage. Sites can be chosen for modification in silent or “safe-harbor” regions of the genome, distant from genes and regulatory elements, to minimize potentially deleterious effects on cellular function. Sites within functional genetic elements can also be used to track cell fate.

[0732] For example, donor polynucleotides can be introduced into stem cell and/or stem cell populations. The methods of the disclosure can be used for tracking cell lineage development in animal models. For example, cell fate development and/or differentiation in hematopoiesis can be tracked using the methods of the disclosure. The methods of the disclosure can be used for therapeutic cell engineering-based therapies. For example, a cell can be tagged with a donor polynucleotide encoding a therapeutic protein. The cell can be propagated. The propagated cell can be introduced into a subject. As another example, a differentiated cell can be removed from a subject. The differentiated cell can be tagged with two markers: one expressed when the cell is differentiated, one expressed when the cell is de-differentiated. Identifying the markers can be useful in determining differentiation events. In another example, a differentiated cell can be obtained from a subject. The differentiated cell can be de-differentiated into a pluripotent cell. The pluripotent cell can be tagged with a donor polynucleotide encoding a therapeutic protein. The cell can be re-differentiated into a new cell type while expressing the therapeutic protein, thereby creating a patient-specific therapeutic cell. Tagged cells can divide and differentiate, and the modification(s) to their genome can be transmitted to each daughter cell during cell division.

[0733] In some instances, two cells can be tagged with two different donor polynucleotide markers. The two cells can be combined. The combined mixture can be assayed simultaneously. The donor polynucleotides can allow the multiplex analysis of the two cells because the donor polynucleotide can be used to distinguish the two cells.

[0734] A cell population can be chosen for introducing double-stranded breaks, or generating cellular signatures. Cells may be purified or selected. For example, a population of hematopoetic stem cells (CD45positive) may be selected by FACS or magnetic bead purification. Bone marrow may be treated ex vivo with the nuclease. Cells may be targeted in vivo by the use of viruses with a particular tropism. Cells may be selected by using viruses engineered to target cells bearing a particular receptor.

[0735] Tagged cells can be analyzed by high-throughput sequencing either at the population level or at the single-cell level. At the population level, a collection of cells can be lysed. The genomic DNA can be extracted. PCR primers can be designed to amplify the genomic region that has been modified by the nuclease. Sequences can be enriched by hybridization. A sequence library can be prepared from the genomic DNA and enriched. The region of interest can be enriched, and a sequence library can be prepared. A sequence library can be prepared simultaneously during enrichment using primers comprising appropriate sequence tags to be used with nucleic acid sequencing technologies. If the double-stranded break is made within a region that can be transcribed, RNA can be used to prepare sequence libraries.

[0736] Once nucleic acid sequence data has been obtained, the sequences can be analyzed to determine the clonal structure. This can be carried out by gathering common sequences together and counting those sequences.

[0737] Cells can be sub-selected by sorting schemes based on cell surface markers using flow cytometry or affinity purification methods. Cell surface markers can be used to define cell states, and by comparing cell states with clonal structure, the fate of modified cell populations can be determined.

[0738] At the single-cell level, cells can be isolated. PCR products can be generated from each individual cell. This can be achieved in microwell arrays, microfluidic devices, and/or emulsions. Where more than one genomic modification is carried out per cell, PCR products can be coupled together, cither physically, or chemically, to ensure their relationship to the parent cell.

### Methods for Quantifying Genome-Editing Events

[0739] For RNA-dependent nucleases, such as Cas9, the nucleic acid recognition functionality and nuclease activities can be linked. In some instances, nucleic acid recognition functionality and nuclease activities may not be linked. The nuclease sites can be located within the specific sequence recognized by the nuclease.

[0740] Non-Homologous End-Joining can be an imperfect repair process that can result in the insertion of multiple bases at the site of the double-stranded break. NHEJ can result in the introduction of insertions, deletions and/or mutations into a cut site. NHEJ can significantly disrupt the original sequence. The disruption of the native sequence as a consequence of repair mechanisms can be used to assess the efficiency of genome editing approaches.

[0741] Homologous recombination can enable more complete repair of the target nucleic acid break by exchanging nucleotide sequences between similar or identical molecules of nucleic acid. An additional sequence can be introduced into the target nucleic acid at the cut site by use of a donor cassette (e.g., donor polynucleotide) that comprises ends homologous to sequences either side of the double-strand break and additional sequence between the two ends.

[0742] This disclosure describes an approach for assessing double-stranded break activity and NHEJ-mediated insertions/deletions introduced by nucleic acid-dependent nucleases, such as Cas9. The method takes advantage of the fact that the sites in a target nucleic acid recognized by Cas9 during the initial nuclease recognition and nucleic acid cleavage activity can be destroyed during the NHEJ process, either by the introduction of insertions or deletions.

[0743] In some instances, the method provides for the design of a nucleic acid-targeting nucleic acid to target a site of interest in a target nucleic acid (e.g., genome). A nucleic acid template encoding the nucleic acid-targeting nucleic acid can be designed with a promoter sequence appended at the 5′ end of the nucleic acid-targeting nucleic acid to enable in vitro synthesis of the nucleic acid-targeting nucleic acid.

[0744] Primers can be designed at positions that flank the cleavage site. The cleavage site (and/or nucleic acid regions around the cleavage site) can be amplified (e.g., from genomic nucleic acid), thereby generating a product (e.g., amplified PCR product). The product (e.g., amplified PCR product) can be at least about 100, 200, 300, 400, 500, 600, 700, 800, 900, 1000, 1100, 1200 or more bases in length. The product (e.g., amplified PCR product) can be at most about 100, 200, 300, 400, 500, 600, 700, 800, 900, 1000, 1100, 1200 or more bases in length. The product (e.g., amplified PCR product) can be about 200-600 base pairs in length.

[0745] The products can be purified. The products can be incubated with an RNA-dependent nuclease (e.g. Cas9) and the nucleic acid-targeting nucleic acid. Those molecules that have been amplified from genomic nucleic acid that have not be modified by NHEJ can comprise the correct sequence that can be recognized and cleaved by Cas9. The molecules that have been amplified from genomic nucleic acid that has been modified by NHEJ may not comprise sites that can be recognized and/or cut by Cas9.

[0746] The digested products can then be analyzed by methods such as gel electrophoresis, capillary electrophoresis, high-throughput sequencing and/or quantitative PCR (e.g., qPCR). In the case of gel electrophoresis, a gel can be imaged. Once a gel has been imaged, the percentage of cells modified by NHEJ can be estimated by measuring the intensity of bands corresponding to digested products, and comparing to the intensity of bands corresponding to undigested products.

Methods for Delivering Donor Polynucleotide to a Double-Stranded Break for Insertion into the Double-Stranded Break

[0747] This disclosure describes methods for bringing a donor polynucleotide into close proximity to a site-directed target nucleic acid break to enhance insertion (e.g., homologous recombination) of the donor polynucleotide into the site of the double-stranded break. The method can be performed using any of the site-directed polypeptides, nucleic acid-targeting nucleic acids, and complexes of site-directed polypeptides and nucleic acid-targeting nucleic acids as described herein.

[0748] In some instances, the methods of the disclosure provide for bringing a donor polynucleotide in close proximity to the site of a double-stranded break in a target nucleic acid, by binding it to the nuclease that generates the double-stranded break (e.g., Cas9).

[0749] A complex comprising a site-directed polypeptide, a nucleic acid-targeting nucleic acid, and a donor polynucleotide can be delivered to a target nucleic acid. FIG. 30 illustrates exemplary methods for bringing a donor polynucleotide into proximity to the site of a double-stranded break in a target nucleic acid. For example, a nucleic acid-targeting nucleic acid can comprise a 3′ hybridizing extension sequence, which can be part of a tracrRNA extension sequence (shown in the light dotted line attached to the nucleic acid-targeting nucleic acid). A 3′ hybridizing extension sequence can be a non-native sequence. FIG. 30A illustrates that the tracrRNA extension sequence at the 3′ end of the nucleic acid-targeting nucleic acid can include a sequence that can hybridize to an end of the donor polynucleotide (e.g., the 3′ end) (the donor polynucleotide is shown in bold thicker dashed line). The 3′ hybridizing extension sequence can be at least about 1, 2, 3, 4, 5, 6, 7, 8, 9, or 10 or more nucleotides in length. The 3′ hybridizing extension sequence can be at most about 1, 2, 3, 4, 5, 6, 7, 8, 9, or 10 or more nucleotides in length. The 3′ hybridizing sequence can hybridize to at least about 1, 2, 3, 4, 5, 5, 6, 7, 8, 9, or 10 or more nucleotides of the donor polynucleotide. The 3′ hybridizing sequence can hybridize to at most about 1, 2, 3, 4, 5, 5, 6, 7, 8, 9, or 10 or more nucleotides of the donor polynucleotide. The 3′ hybridizing sequence can hybridize to the donor polynucleotide with at least 1, 2, 3, 4, 5, 6, 7, 8, 9, or 10 or more mismatches. The 3′ hybridizing sequence can hybridize to the donor polynucleotide with at most 1, 2, 3, 4, 5, 6, 7, 8, 9, or 10 or more mismatches.

[0750] The 3′ hybridizing extension can hybridize to the 3′ end of the donor polynucleotide. The 3′ hybridizing extension can hybridize to at least the 1, 2, 3, 4, 5, 6, 7, 8, 9, or 10 or more 3′ most nucleotides of the donor polynucleotide. The 3′ hybridizing extension can hybridize to at most the 1, 2, 3, 4, 5, 6, 7, 8, 9, or 10 or more 3′ most nucleotides of the donor polynucleotide.

[0751] As depicted in FIG. 30B, the tracr nucleic acid extension at the 3′ end of the nucleic acid-targeting nucleic acid can include a sequence that can hybridize to the 5′ end of the donor DNA. The 3′ hybridizing extension can hybridize to at least the 1, 2, 3, 4, 5, 6, 7, 8, 9, or 10 or more 5′ most nucleotides of the donor polynucleotide. The 3′ hybridizing extension can hybridize to at most the 1, 2, 3, 4, 5, 6, 7, 8, 9, or 10 or more 5′ most nucleotides of the donor polynucleotide.

[0752] The tracr nucleic acid extension at the 3′ end of the nucleic acid-targeting nucleic acid can include a sequence that can hybridize to a region between the 3′ end and 5′ end of the donor polynucleotide, as shown in FIG. 30C. The 3′ hybridizing extension can hybridize to at least 1, 2, 3, 4, 5, 6, 7, 8, 9, or 10 or more nucleotides between the 3′ and 5′ end of the donor polynucleotide. The 3′ hybridizing extension can hybridize to at most the 1, 2, 3, 4, 5, 6, 7, 8, 9, or 10 or more nucleotides between the 3′ and 5′ end of the donor polynucleotide.

[0753] The tracr nucleic acid extension at the 3′ end of the nucleic acid-targeting nucleic acid can include a sequence that can hybridize along the full length of the donor polynucleotide, as shown in FIG. 30D. The nucleic acid-targeting nucleic acid can hybridize along at least about 20, 30, 40, 50, 60, 70, 80, 90, or 100% of the donor polynucleotide. The nucleic acid-targeting nucleic acid can hybridize along at most about 20, 30, 40, 50, 60, 70, 80, 90, or 100% of the donor polynucleotide. The 3′ hybridizing extension sequence can hybridize along the full length of the donor polynucleotide with at least about 1, 2, 3, 4, 5, 6, 7, 8, 9 or 10 or more mismatches. The 3′ hybridizing extension sequence can hybridize along the full length of the donor polynucleotide with at most about 1, 2, 3, 4, 5, 6, 7, 8, 9 or 10 or more mismatches.

[0754] The tracr nucleic acid extension at the 3′ end of the nucleic acid-targeting nucleic acid (e.g., 3′ hybridizing extension) can comprise a sequence that can be used as a template and converted by, for example, a reverse transcriptase to generate hybrid nucleic acid (e.g., the resulting nucleic acid is an RNA-DNA hybrid, wherein the newly transcribed nucleic acid can be DNA), as shown in FIG. 30E. Exemplary reverse transcriptases include

[0755] SuperScript, ThermoScript, HIV reverse transcriptase, and MMLV reverse transcriptase. The reverse transcriptase can extend the donor polynucleotide sequence from the 3′ hybridizing extension template.

[0756] The tracr nucleic acid extension at the 3′ end of the nucleic acid-targeting nucleic acid can incorporate a nucleic acid sequence that can bind an RNA binding protein (RBP). The RNA-binding protein can be fused to a DNA binding protein (DBP), as shown in FIG. 30F. The DNA-binding protein can bind to the donor polynucleotide.

[0757] The sequences used to bring the donor polynucleotide into close proximity with a double-stranded break can be appended to the 5′ end of the nucleic acid-targeting nucleic acid (e.g., the spacer extension). The sequences used to bring the donor polynucleotide into close proximity with a double-stranded break can be appended to both the 5′ end and the 3′ end of the nucleic acid-targeting nucleic acid.

[0758] The nuclease used in the methods of the disclosure (e.g., Cas9) can comprise nickase activity in which the nuclease can introduce single-stranded breaks in a target nucleic acid. Pairs of nucleases with nickase activity can be targeted to regions in close proximity to each other. A first nuclease can bind to a first nucleic acid-targeting nucleic acid that can interact with a first donor polynucleotide. A second nuclease can bind to a second nucleic acid-targeting nucleic acid that can interact with a second donor polynucleotide. The first and second donor polynucleotides can be designed to hybridize with each other to make a double-stranded donor polynucleotide. Two separate donor polynucleotides can be brought to the nuclease site.

[0759] In some embodiments, the donor polynucleotide can be single-stranded. In some embodiments, the donor polynucleotide can be double-stranded. In some embodiments, the donor DNA can be a minicircle. In some embodiments, the donor polynucleotide can be a plasmid. In some embodiments, the plasmid can be supercoiled. In some embodiments, the donor polynucleotide can be methylated. In some embodiments, the donor polynucleotide can be unmethylated. The donor polynucleotide can comprise a modification. Modifications can include those described here including, but not limited to, biotinylation, chemical conjugate, and synthetic nucleotides.

### Methods for Cloning and Expressing a Vector Comprising a Site-Directed Polypeptide and a Nucleic Acid-Targeting Nucleic Acid

[0760] The disclosure provides for methods for cloning an engineered nucleic acid-targeting nucleic acid into a vector (e.g., a linearized vector). The method can be performed using any of the site-directed polypeptides, nucleic acid-targeting nucleic acids, and complexes of site-directed polypeptides and nucleic acid-targeting nucleic acids as described herein.

[0761] A user (e.g., a scientist) can design single-stranded DNA oligonucleotides. The single-stranded DNA oliognucleotides can, when hybridized together encode a spacer sequence to target a target nucleic acid. The single-stranded DNA olignonucleotides can be at least about 5, 10, 15, 20, 25, 30 or more nucleotides in length. The single-stranded DNA olignonucleotides can be at most about 5, 10, 15, 20, 25, 30 or more nucleotides in length. The single-stranded DNA oligonucleotides can be 19-20 nucleotides in length.

[0762] A single-stranded DNA oligonucleotide can be designed such that it can hybridize to a target nucleic acid (e.g., a sequence adjacent to a protospacer adjacent motif, such as the 3′ or 5′ end of the protospacer adjacent motif). The DNA oligonucleotide can encode a sequence corresponding to the sense or antisense strand of the target nucleic acid sequence.

[0763] The single-stranded oligonucleotides can comprise a first portion that can hybridize and/or is complementary to a target nucleic acid. The single-stranded oligonucleotides can comprise a first portion that can hybridize and/or is complementary another single-stranded oligonucleotide. The single-stranded oligonuclotide can comprise a second portion that can hybridize to a sequence in the linearized vector. In other words, a pair of single-stranded oligonucleotides can comprise a first portion that hybridizes to each other and a second portion that comprise single-stranded overhangs, wherein the overhangs can hybridize to sticky ends in the linearized vector. In some instances, an overhang comprises 5′-GTTTT-3′. In some instances, an overhang comprises 5′-CGGTG-3′.

[0764] The single-stranded DNA nucleotides can be annealed together to generate a double-stranded oligonucleotide. The single-stranded DNA nucleotides can be annealed together in an oligonucleotide annealing buffer (e.g., comprising Tris-HCl, EDTA and NaCl). The double-stranded oligonucleotide can be diluted to a working concentration (e.g., a concentration suitable for ligation into a linearized plasmid). The diluted double-stranded oligonucleotide can be ligated into a linearized vector. Ligation can be performed in a ligation buffer (e.g., comprising Tris-HCl, MgCl2, ATP) and with a ligase (e.g., T4 DNA ligase). The double-stranded oligonucleotide can be ligated into a linearized vector at a region within the sequence encoding the nucleic acid-targeting nucleic acid. In other words, the linearized vector can be linearized at a point within the region encoding the nucleic acid-targeting nucleic acid, wherein the linearization generates sticky ends that are complementary to the sticky ends of the double-stranded oligonucleotide. When the double-stranded oligonucleotide is ligated into the vector, it can generate a sequence encoding for an engineered nucleic acid-targeting nucleic acid comprising a spacer sequence corresponding to the double-stranded oligonucleotide sequence.

[0765] The ligated vector can be transformed into chemically competent cells (e.g., DH5-alpha, Top10) and selected for expression of the correctly ligated vector (e.g., by antibiotic screening). The selected transformants can be analyzed for the presence of an insert by sequencing. Sequencing can be performed using a sequencing primer that can hybridize to a portion of the vector.

[0766] Correctly ligated vector can be prepared (e.g., by large scale DNA preparation, maxiprep), and purified. The vector, comprising a site-directed polypeptide, a nucleic acid-targeting nucleic acid, wherein the nucleic acid-targeting nucleic acid comprise the double-stranded DNA oligonucleotides can be introduced (e.g., transfected) into a cell line of choice (e.g., mammalian cell line).

[0767] While preferred embodiments of the present invention have been shown and described herein, it will be obvious to those skilled in the art that such embodiments are provided by way of example only. Numerous variations, changes, and substitutions will now occur to those skilled in the art without departing from the invention. It should be understood that various alternatives to the embodiments of the invention described herein may be employed in practicing the invention. It is intended that the following claims define the scope of the invention and that methods and structures within the scope of these claims and their equivalents be covered thereby.

### EXAMPLES

### Example 1: Modification of a Site-Directed Polypeptide for Altered Pam Specificity

[0768] In some embodiments, the disclosure provides for a modified site-directed polypeptide that is modified to alter PAM specificity. A nucleic acid encoding a modified site-directed polypeptide is introduced into cells by transfection. The modified site-directed polypeptide comprises an inserted HNH or RuvC nuclease domain. The modified site-directed polypeptide comprises a modified highly basic patch. A nucleic acid-targeting nucleic acid that comprises a spacer that can hybridize with the target nucleic acid is also introduced into cells by transfection. The modified site-directed polypeptide and the nucleic acid-targeting nucleic acid form a complex. The complex is guided to the target nucleic acid by the nucleic acid-targeting nucleic acid. Once hybridized with the nucleic acid-targeting nucleic acid, the target nucleic acid is cleaved by the nuclease domains of the site-directed polypeptide. In some embodiments, the modified site-directed polypeptide binds to the target nucleic acid with a lower Kd.

[0769] In some embodiments, a donor polynucleotide is also introduced into the cells. In some instances, the donor polynucleotide, a portion of the donor polynucleotide, a copy of the donor polynucleotide, or a portion of a copy of the donor polynucleotide is inserted into the cleaved target nucleic acid.

### Example 2: Modification of a Site-Directed Polypeptide for Altered Target Nucleic Acid Specificity

[0770] In some embodiments, the disclosure provides for a modified site-directed polypeptide that is modified to alter target nucleic acid specificity. A modified site-directed polypeptide is introduced into cells. The modified site-directed polypeptide comprises a modification in the highly basic patch and/or the HNH-like domain. A nucleic acid-targeting nucleic acid that comprises a spacer that can hybridize with the target nucleic acid is also introduced into cells. The modified site-directed polypeptide and the nucleic acid-targeting nucleic acid form a complex. The complex is guided to the target nucleic acid by the nucleic acid-targeting nucleic acid. Once hybridized with the nucleic acid-targeting nucleic acid, the target nucleic acid is cleaved by the site-directed polypeptide. In some embodiments, the modified site-directed polypeptide binds to the target nucleic acid with a lower Kd.

[0771] In some embodiments, a donor polynucleotide is also introduced into the cells. In some instances, the donor polynucleotide, a portion of the donor polynucleotide, a copy of the donor polynucleotide, or a portion of a copy of the donor polynucleotide is inserted into the cleaved target nucleic acid.

### Example 3: Recombinant Expression of a Site-Directed Polypeptide

[0772] A recombinant DNA sequence can be assembled that encodes for a modified site-directed polypeptide, and enables the expression of the modified site-directed polypeptide in a host organism. The recombinant DNA sequence comprises a promoter sequence, and may additionally comprise an affinity tag for purification, or an epitope tag. In a non-limiting example, a plasmid comprises the recombinant DNA sequence for expression of the modified site-directed polypeptide.

### Production of Recombinant Protein.

[0773] A plasmid encoding the site directed modified polypeptide is introduced into bacterial cells (e.g., E. coli). The polypeptide is expressed in bacterial cells, and then purified from cell lysate using chromatography methods. The activity of the modified site-directed polypeptide is measured using assay methods designed to determine the specificity of the modified polypeptide, the PAM sequence, the specificity profile of the site-directed polypeptide and the nucleic acid preference (for example, DNA or RNA, or modified nucleic acids).

[0774] Software is designed to choose sites that can be cut using the modified site-directed polypeptide. Guide RNA sequences are designed to direct the activity of the site-directed polypeptide. Once designed, the site-directed polypeptide is used to cleave nucleic acids.

[0775] Introduction of the modified site-directed polypeptide into cells

[0776] The modified peptide is introduced into cells to target nucleic acid sites. A polypeptide that retains nuclease activity is used to introduce single-stranded or double-stranded DNA breaks into target DNA. A polypeptide with DNA-binding but not DNA cutting activity, is used to bind double-stranded DNA to a cell. This can be used to effect transcriptional activation or repression.

### Example 4: Selection of Sites for Modification within Cas9 Sequences

[0777] As described above Type II CRISPR systems containing Cas9 orthologues can be classified into three groups (Type II-A, Type II-B, and Type II-C) based on analysis of their CRISPR-Cas loci. Cas9 orthologues within these groups can be broadly defined by two clades comprising shorter (Cas9/Csn1-type) and longer (Cas9/Csx12-type) sequences. In addition to these larger groups, there can be two additional families of homologues that comprise HNH and RuvC domains arranged with similar topology to Cas9, but with significant differences in the length and sequence of insertions between conserved sequence elements. Secondary structure predictions and sequence alignments are used to define regions of the polypeptide for modification. Regions that fall between secondary structure elements or between regions of high sequence conservation are selected as candidates for insertions or deletions. Regions that have similarity to domains of known structure are analyzed to identify specific regions for inserting or deleting sequences.

[0778] FIG. 35 shows the CDD sequence alignment TIGR0185 for a small number of diverse Cas9 orthologs. Amino acids with a “X” below them are considered to be similar. Amino acids with a “Y” below them can be considered to be highly conserved or identical in all sequences. Amino acids residues without an “X” or a “Y” are not conserved. This alignment does not include the C-terminal region (approximately corresponding to amino acid residues 1100-1350) of longer Cas9 orthologs. The sequences listed in FIG. 35 are listed in Table 6.

TABLE 6
Sequences listed in FIG. 35.

| Genbank | Accession | Species |
|---|---|---|
| gi | 22533915 | Streptococcus agalactiae 2603V/R |
| gi | 34483507 | Wolinella succinogenes |
| gi | 12721472 | Pasteurella multocida subsp. multocida str. |
| | | Pm70 |
| gi | 24377777 | Streptococcus mutans UA159 |
| gi | 13622193 | Streptococcus pyogenes M1 GAS |
| gi | 41815893 | Treponema denticola ATCC 35405 |
| gi | 218767588 | Neisseria meningitidis Z2491 |
| gi | 157150687 | Streptococcus gordonii str. Challis substr. CH1 |
| gi | 294660600 | Mycoplasma gallisepticum str. R(low) |
| gi | 218563121 | Campylobacter jejuni subsp. jejuni NCTC |
| | | 11168 = ATCC 700819 |
| gi | 370792169 | Listeria innocua ATCC 33091 |

[0779] Locations for insertion of new functional domains, regions for insertion of alternative sequences, or for deletion or reduction in region size that modify Cas9 activity can include, but are not limited to, the regions highlighted in Table 7. The numbers represent the amino-acid sequence numbers based on the Cas9 sequence from Streptococcus pyogenes M1 GAS.

TABLE 7
Exemplary locations for modifying Cas9

| gi\|13622193 | Streptococcus pyogenes M1 GAS | | |
|---|---|---|---|
| Insertion/Deletion site | start | finish | Length |
| 1 | 22 | 42 | 20 |
| 2 | 97 | 134 | 37 |
| 3 | 170 | 312 | 142 |
| 4 | 350 | 400 | 50 |
| 5 | 426 | 444 | 18 |
| 6 | 455 | 492 | 37 |
| 7 | 528 | 541 | 13 |
| 8 | 578 | 589 | 11 |
| 9 | 600 | 612 | 12 |
| 10 | 628 | 634 | 6 |
| 11 | 654 | 658 | 4 |
| 12 | 684 | 692 | 8 |
| 13 | 710 | 727 | 17 |
| 14 | 753 | 756 | 3 |
| 15 | 792 | 794 | 2 |
| 16 | 801 | 804 | 3 |
| 17 | 826 | 834 | 8 |
| 18 | 873 | 881 | 8 |
| 19 | 893 | 915 | 22 |
| 20 | 939 | 952 | 13 |
| 21 | 971 | 974 | 3 |
| 22 | 1005 | 1029 | 24 |
| 23 | 1096 | 1225 | 129 |
| 24 | 1105 | 1138 | 33 |

[0780] Once a region has been identified as a potential location for inserting a new polypeptide sequence into the protein, or deleting a region of the protein, the DNA sequence that codes for the protein is modified to incorporate the modification.

### Example 5: Sequence Enrichment of Site-Directed Polypeptide-Bound Target Nucleic Acid

[0781] The disclosure provides methods for sequence enrichment without amplification using site-directed polypeptides.

[0782] In some embodiments, the method will comprise a) contacting a target nucleic acid with a complex comprising a nucleic acid-targeting nucleic acid and a site-directed polypeptide, b) cleaving the target nucleic acid c) purifying the target nucleic acid, and d) sequencing the target nucleic acid, wherein said target nucleic acid is enriched.

[0783] In some embodiments, the site-directed polypeptide will be enzymatically inactive. Use of an enzymatically inactive site-directed polypeptide will facilitate binding of the target nucleic acid to the site-directed polypeptide complex. In some embodiments, the site-directed polypeptide will be enzymatically active.

[0784] In some embodiments, sequence enrichment will be performed outside of cells (e.g., cell-free sample). For example, a sample will comprise purified genomic DNA. In some embodiments, sequence enrichment will be performed on a cellular sample (e.g. cells, cell lysate).

[0785] In some instances, the site-directed polypeptide-target nucleic acid complexes will be fixed or cross-linked to form complexes. If the method is being performed on cells, cells will be lysed. Lysis conditions will be chosen to maintain intact protein-DNA complexes.

[0786] The nucleic acid sample will be treated to fragment the target nucleic acid before affinity purification. Fragmentation can be performed through physical, mechanical or enzymatic methods. Physical fragmentation will include exposing a target polynucleotide to heat or to ultraviolet (UV) light. Mechanical disruption will be used to mechanically shear a target polynucleotide into fragments of the desired range. Mechanical shearing will be accomplished through a number of methods, including repetitive pipetting of the target polynucleotide, sonication and nebulization. Target nucleic acids will also be fragmented using enzymatic methods. In some cases, enzymatic digestion will be performed using enzymes such as using restriction enzymes. Restriction enzymes will be used to perform specific or non-specific fragmentation of target polynucleotides. The methods will use one or more types of restriction enzymes, generally described as Type I enzymes, Type II enzymes, and/or Type III enzymes. Type II and Type III enzymes recognize specific sequences of nucleotides within a double-stranded polynucleotide sequence (a “recognition sequence” or “recognition site”). Upon binding and recognition of these sequences, Type II and Type III enzymes cleave the polynucleotide sequence. In some cases, cleavage will result in a polynucleotide fragment with a portion of overhanging single-stranded nucleic acid, called a “sticky end.” In other cases, cleavage will not result in a fragment with an overhang, creating a “blunt end.” The methods may comprise use of restriction enzymes that generate either sticky ends or blunt ends.

[0787] Once fragmented, the complexes comprising the site-directed polypeptide will be purified by incubation with a solid support. For example, if the site-directed polypeptide comprises a biotin tag, the solid support will be coated with avidin or streptavidin to bind to the biotin tag.

[0788] In an alternative embodiment, once fragmented, the complexes comprising the site-directed polypeptide, the target nucleic acid, and/or the nucleic acid-targeting nucleic acid, will be purified by incubation with a capture agent. The capture agent will bind to the affinity tag fused to the site-directed polypeptide. The capture agent will comprise an antibody. For example, if the affinity tag fused to the site-directed polypeptide is a FLAG tag, then the capture agent will be an anti-FLAG-tag antibody.

[0789] In some embodiments, the capture agent will be purified with a solid support. For example, if the capture agent comprises a biotin tag, the solid support will be coated with avidin or streptavidin to bind the biotinylated capture agent.

[0790] In some embodiments, the nucleic acid-targeting nucleic acid will comprise an affinity tag. The affinity tag will comprise a sequence that can bind to an endoribonuclease. In some instances, the affinity tag will comprise a sequence that can bind to a conditionally enzymatically inactive endoribonuclease. The conditionally enzymatically inactive endoribonuclease will bind, but not cleave, the affinity tag.

[0791] In some embodiments, the endoribonuclease and/or the conditionally enzymatically inactive endoribonuclease will comprise an affinity tag.

[0792] The conditionally enzymatically inactive endoribonuclease will be purified with a solid support. The solid support will bind to the affinity tag of the conditionally enzymatically inactive endoribonuclease. For example, if the conditionally enzymatically inactive endoribonuclease comprises a biotin tag, the solid support will be coated with avidin or streptavidin to bind the biotinylated capture agent.

[0793] In some embodiments, the conditionally enzymatically inactive endoribonuclease will be immobilized on any of a variety of insoluble support.

[0794] In some embodiments of the method, two rounds of purification will be performed. In some instances, a first round will comprise purification with a solid support that will bind to the affinity tag of the capture agent and a second round will comprise purification with a solid support that will bind to the affinity tag of the site-directed polypeptide. In some instances, a first round will comprise purification with a solid support that will bind to the affinity tag of the site-directed polypeptide and a second round will comprise purification with a solid support that will bind to the affinity tag of the capture agent.

[0795] In some embodiments, the methods of the disclosure will be used for multiplex sequence enrichment. In this embodiment, a plurality of nucleic acid-targeting nucleic acids can be contacted with a nucleic acid sample, wherein each nucleic acid-targeting nucleic acid is engineered to target a different target nucleic acid (e.g., sequence in a genome) within the nucleic acid sample.

[0796] The captured complexes will comprise a target nucleic acid. The target nucleic acid will be eluted from the site-directed polypeptide complex by standard methods including high salt washing, ethanol precipitation, boiling, gel purification, and the like.

[0797] The eluted DNA will be prepared for sequencing analysis by ligation of one or more adaptors.

[0798] The sequencing libraries will be sequenced as described herein. Sequenced libraries will be analyzed to identify polymorphisms, diagnose a disease, determine a course of treatment for a disease, and/or generate antibody libraries.

### Example 6: Sequence Enrichment of Target Nucleic Acid not Bound to a Complex Comprising a Site-Directed Polypeptide

[0799] In some embodiments, sequence enrichment will be performed with an enzymatically active site-directed polypeptide. In some instances, the site-directed polypeptide will be enzymatically active. In this instance, the target nucleic acid will not be bound to the site-directed polypeptide, but will be excised.

[0800] A target nucleic acid will be identified, and nucleic acid-targeting nucleic acids will be designed to direct the site-directed polypeptide to sequences that flank the target nucleic acid. The sample will be incubated with a complex comprising a designed nucleic acid-targeting nucleic acid and the site-directed polypeptide such that the site-directed polypeptide will cleave the DNA at both ends of the target nucleic acid. Upon cleavage of the target nucleic acid, the target nucleic acid will be cleaved from the parent nucleic acid. The cleaved target nucleic acid will be purified (e.g., by gel electrophoresis, size-selective elution from beads, or other carboxylate-derivatized beads, or by precipitation with appropriate concentrations of salt and PEG to preferentially precipitate larger or smaller DNA).

[0801] In some embodiments, sequence enrichment will be performed outside of cells (e.g., cell-free sample). For example, a sample will comprise purified genomic DNA. In some embodiments, sequence enrichment will be performed on a cellular sample (e.g. cells, cell lysate).

[0802] If the method is being performed on cells, cells will be lysed. Lysis conditions will be chosen to maintain intact protein-DNA complexes.

[0803] In some embodiments, the target nucleic acid to be sequenced will not be bound to a nucleic acid-targeting nucleic acid and/or a site-directed polypeptide. In this embodiment, the nucleic acid bound to the site-directed polypeptide and/or the nucleic acid-targeting nucleic acid will be purified away. The purification of the site-directed polypeptide will proceed as previously described herein. Briefly, the complexes comprising the site-directed polypeptide will be purified by incubation with a solid support. For example, if the site-directed polypeptide comprises a biotin tag, the solid support will be coated with avidin or streptavidin to bind to the biotin tag.

[0804] In an alternative embodiment, once fragmented, the complexes comprising the site-directed polypeptide, the nucleic acid-targeting nucleic acid, and non-target nucleic acid, will be purified by incubation with a capture agent. The capture agent will bind to the affinity tag fused to the site-directed polypeptide. The capture agent will comprise an antibody. For example, if the affinity tag fused to the site-directed polypeptide is a FLAG tag, then the capture agent will be an anti-FLAG-tag antibody.

[0805] The capture agent will be purified with a solid support. For example, if the capture agent comprises a biotin tag, the solid support will be coated with avidin or streptavidin to bind the biotinylated capture agent.

[0806] In some embodiments, the methods of the disclosure will be used for multiplex sequence enrichment. In this embodiment, a plurality of nucleic acid-targeting nucleic acids can be introduced into a cell, wherein each nucleic acid-targeting nucleic acid is engineered to target a different target nucleic acid (e.g., sequence in a genome).

[0807] The captured complex will not comprise a target nucleic acid.

[0808] The target nucleic acid will comprise the nucleic acid that is not bound to the complexes comprising the site-directed polypeptide. The target nucleic acid can be collected by standard nucleic acid purification methods (e.g., a commercially available PCR purification kit, an agarose gel).

[0809] The collected target nucleic acid will be prepared for sequencing analysis (e.g., deep sequencing) by ligation of one or more adapters as described herein.

[0810] Sequenced target nucleic acid will be analyzed to identify polymorphisms, diagnose a disease, determine a course of treatment for a disease, and/or generate antibody libraries.

### Example 7: Sequencing

[0811] The eluted target nucleic acids will be prepared for sequencing analysis. Preparation for sequencing analysis will include the generation of sequencing libraries of the eluted target nucleic acid. Sequencing analysis will determine the identity and frequency of off-target binding sites of site-directed polypeptides.

[0812] Sequence determination will be performed using methods that determine many (typically thousands to billions) nucleic acid sequences in an intrinsically parallel manner, where many sequences are read out preferably in parallel using a high throughput serial process. Such methods can include but are not limited to pyrosequencing (for example, as commercialized by 454 Life Sciences, Inc., Branford, Conn.); sequencing by ligation (for example, as commercialized in the SOLiD™ technology, Life Technology, Inc., Carlsbad, Calif.); sequencing by synthesis using modified nucleotides (such as commercialized in TruSeq™ and HiSeq™ technology by Illumina, Inc., San Diego, Calif., HeliScope™ by Helicos Biosciences Corporation, Cambridge, Mass., and PacBio RS by Pacific Biosciences of California, Inc., Menlo Park, Calif.), sequencing by ion detection technologies (Ion Torrent, Inc., South San Francisco, Calif.); sequencing of DNA nanoballs (Complete Genomics, Inc., Mountain View, Calif.); nanopore-based sequencing technologies (for example, as developed by Oxford Nanopore Technologies, LTD, Oxford, UK), capillary sequencing (e.g, such as commercialized in MegaBACE by Molecular Dynamics), electronic sequencing, single molecule sequencing (e.g., such as commercialized in SMRT™ technology by Pacific Biosciences, Menlo Park, Calif.), droplet microfluidic sequencing, sequencing by hybridization (such as commercialized by Affymetrix, Santa Clara, Calif), bisulfate sequencing, and other known highly parallelized sequencing methods.

[0813] In some embodiments, sequencing will be performed by microarray analysis.

### Example 8: Generation of Antibody Libraries

[0814] The methods disclosed herein will be used to generate protein libraries (e.g., antibody libraries). Protein libraries will be useful for preparing expression libraries, which will be used for screening proteins (e.g. antibodies) for use in therapeutics, reagents, and/or diagnostics. Protein libraries will also be useful for synthesizing and/or cloning additional antibodies.

[0815] Protein libraries will be generated by engineering a nucleic acid-targeting nucleic acid to hybridize to target nucleic acid sequences encoding immunoglobulins. The complexes comprising a site-directed polypeptide and the nucleic acid-targeting nucleic acid will be purified using methods described herein. In some embodiments, the nucleic acid hybridizing to the nucleic acid-targeting nucleic acid will be the target nucleic acid and will be eluted and sequenced, using methods described herein. In some embodiments, the nucleic acid hybridizing to the nucleic-acid targeting nucleic acid will not be the target nucleic acid. The target nucleic acid will be the nucleic acid that is excised between the cleavage sites of a plurality of complexes (e.g., complexes comprising a site-directed polypeptide and nucleic acid-targeting nucleic acid). The excised target nucleic acid will be purified and sequenced, using methods described herein.

### Example 9: Genotyping

[0816] The methods disclosed herein will be used to perform Human Leukocyte Antigen (HLA) typing. HLA genes are some of the most polymorphic genes in humans. Understanding the genotypes of these regions will be important for obtaining a good match for tissue and organ transplants.

[0817] To perform HLA typing, a nucleic acid-targeting nucleic acid will be engineered to hybridize to target nucleic acid sequences in HLA genes. The complexes comprising a site-directed polypeptide and the nucleic acid-targeting nucleic acid will be purified using methods described herein. In some embodiments, the nucleic acid hybridizing to the nucleic acid-targeting nucleic acid will be the target nucleic acid and will be eluted and sequenced, using methods described herein. In some embodiments, the nucleic acid hybridizing to the nucleic-acid targeting nucleic acid will not be the target nucleic acid. The target nucleic acid will be the nucleic acid that is excised between the cleavage sites of a plurality of complexes (e.g., complexes comprising a site-directed polypeptide and nucleic acid-targeting nucleic acid). The excised target nucleic acid will be purified and sequenced, using methods described herein.

### Example 10: Site-Directed Polypeptide Immunoprecipitation

[0818] The disclosure provides methods for nuclease immunoprecipitation and sequencing (NIP-Seq). In some embodiments, the method will comprise a) contacting a nucleic acid sample with an enzymatically inactive site-directed polypeptide, wherein the enzymatically inactive site-directed polypeptide binds a target nucleic acid, thereby forming a complex, b) capturing the complex with a capture agent, and c) sequencing the target nucleic acid. In some embodiments, the method will further comprise d) determining the identity of the off-target binding site.

[0819] In some embodiments, the methods of the disclosure will be performed outside of cells. For example, a sample will comprise purified genomic DNA.

[0820] The site-directed polypeptide-target nucleic acid complexes will be fixed or cross-linked to form complexes.

[0821] The nucleic acid (e.g., genomic DNA) will be treated to fragment the DNA before affinity purification. Fragmentation can be performed through physical, mechanical or enzymatic methods. Physical fragmentation can include exposing a target polynucleotide to heat or to ultraviolet (UV) light. Mechanical disruption may be used to mechanically shear a target polynucleotide into fragments of the desired range. Mechanical shearing may be accomplished through a number of methods known in the art, including repetitive pipetting of the target polynucleotide, sonication and nebulization. Target polynucleotides may also be fragmented using enzymatic methods. In some cases, enzymatic digestion may be performed using enzymes such as using restriction enzymes. Restriction enzymes may be used to perform specific or non-specific fragmentation of target polynucleotides. The methods may use one or more types of restriction enzymes, generally described as Type I enzymes, Type II enzymes, and/or Type III enzymes. Type II and Type III enzymes are generally commercially available and well known in the art. Type II and Type III enzymes recognize specific sequences of nucleotide nucleotides within a double-stranded polynucleotide sequence (a “recognition sequence” or “recognition site”). Upon binding and recognition of these sequences, Type II and Type III enzymes cleave the polynucleotide sequence. In some cases, cleavage will result in a polynucleotide fragment with a portion of overhanging single-stranded DNA, called a “sticky end.” In other cases, cleavage will not result in a fragment with an overhang, creating a “blunt end.” The methods may comprise use of restriction enzymes that generate either sticky ends or blunt ends.

[0822] Once fragmented, the complexes comprising the site-directed polypeptide will be purified by incubation with a solid support. For example, if the site-directed polypeptide comprises a biotin tag, the solid support will be coated with avidin or streptavidin to bind to the biotin tag.

[0823] In an alternative embodiment, once fragmented, the complexes comprising the site-directed polypeptide, the target nucleic acid, and/or the nucleic acid-targeting nucleic acid, will be purified by incubation with a capture agent. The capture agent will bind to the affinity tag fused to the site-directed polypeptide. The capture agent will comprise an antibody. For example, if the affinity tag fused to the site-directed polypeptide is a FLAG tag, then the capture agent will be an anti-FLAG-tag antibody.

[0824] The capture agent will be purified with a solid support. For example, if the capture agent comprises a biotin tag, the bead will be coated with avidin or streptavidin to bind the biotinylated capture agent.

[0825] In some embodiments of the method, two or more rounds of purification will be performed. A first round will comprise purification with a solid support that can bind to the affinity tag of the capture agent and a second round will comprise purification with a solid support that can bind to the affinity tag of the site-directed polypeptide. A first round will comprise purification with a solid support that will bind to the affinity tag of the site-directed polypeptide and a second round will comprise purification with a solid support that will bind to the affinity tag of the capture agent.

[0826] In some embodiments, the method will be used to optimize the binding specificity of a site-directed polypeptide by performing the method more than once.

[0827] The captured complex will comprise site-directed polypeptide and a target nucleic acid. The target nucleic acid will be eluted from the site-directed polypeptide complex by standard methods including high salt washing, ethanol precipitation, boiling, gel purification, and the like.

[0828] The eluted DNA will be prepared for sequencing analysis using standard methods. The sequencing libraries will be sequenced and analyzed to identify the sequence, and frequency of nuclease-binding sites.

[0829] In some embodiments, the method will be performed a plurality of times. In some embodiments, the method further comprises collecting data and storing data. The data can be stored collected and stored on a computer server.

### Example 11: In Vivo Site-Directed Polypeptide Immunoprecipitation

[0830] In some embodiments, the method will comprise: a) introducing an enzymatically inactive site-directed polypeptide into a cell, wherein the enzymatically inactive site-directed polypeptide binds a target nucleic acid, thereby forming a complex, b) capturing the complex with a capture agent, and c) sequencing the target nucleic acid. In some embodiments, the method will further comprise d) determining the identity of the off-target binding site.

[0831] In some instances, the site-directed polypeptide will comprise an affinity tag. Polypeptides comprising an affinity tag have been described herein.

[0832] Cells will be fixed or cross-linked. Fixed and/or cross-linked cells will be lysed. Lysis conditions will be chosen to maintain intact protein-DNA complexes. The lysate will be treated to fragment the DNA before affinity purification. Suitable fragmentation techniques are described herein.

[0833] Once fragmented, the complexes comprising the site-directed polypeptide, the target nucleic acid and/or the nucleic acid-targeting nucleic acid, will be purified from the lysate by incubation with a solid support. For example, if the site-directed polypeptide comprises a biotin tag, the solid support will be coated with avidin or streptavidin to bind to the biotin tag.

[0834] In an alternative embodiment, once fragmented, the complexes comprising the site-directed polypeptide, will be purified from the lysate by incubation with a capture agent. The capture agent will bind to the affinity tag fused to the site-directed polypeptide. The capture agent will comprise an antibody. For example, if the affinity tag fused to the site-directed polypeptide is a FLAG tag, then the capture agent will be a FLAG-tag antibody.

[0835] In some embodiments, the capture agent will comprise an affinity tag. The capture agent will be purified with a solid support. The solid support will bind to the affinity tag of the capture agent. For example, if the capture agent comprises a biotin tag, the bead will be coated with avidin or streptavidin to bind the biotinylated capture agent.

[0836] In some embodiments of the method, two rounds of purification will be performed. In some instances, a first round will comprise purification with a solid support that will bind to the affinity tag of the capture agent and a second round will comprise purification with a solid support that will bind to the affinity tag of the site-directed polypeptide. In some instances, a first round will comprise purification with a solid support that will bind to the affinity tag of the site-directed polypeptide, and a second round will comprise purification with a solid support that will bind to the affinity tag of the capture agent.

[0837] In some embodiments, the method will be used to optimize the binding specificity of a site-directed polypeptide by performing the method more than once.

[0838] The captured complex will comprise site-directed polypeptide and a target nucleic acid. The target nucleic acid will be eluted from the site-directed polypeptide complex by standard methods including high salt washing, ethanol precipitation, boiling, gel purification, and the like.

[0839] The eluted DNA will be prepared for sequencing analysis. Sequencing libraries will be made from the eluted target nucleic acid. The sequencing libraries will be sequenced and analyzed to identify the sequence, and frequency of nuclease-binding sites.

### Example 12: Immunoprecipitation with an Enzymatically Inactive Endoribonuclease Capture Agent

[0840] A method for determining the identity of an off-target binding site of a nuclease will comprise: a) contacting a nucleic acid sample with a enzymatically inactive site-directed polypeptide and a nucleic acid-targeting nucleic acid, wherein the enzymatically inactive site-directed polypeptide and nucleic acid-targeting nucleic acid binds a target nucleic acid, thereby forming a complex, b) capturing the complex with a capture agent, wherein the capture agent comprises a conditionally enzymatically inactive site-directed polypeptide, c) sequencing the target nucleic acid, and d) determining the identity of the off-target binding site. This method is designed to be performed on a cell-free nucleic acid sample, and/or a nucleic acid sample originating from a cell.

[0841] The site-directed polypeptide-target nucleic acid complexes will be fixed or cross-linked to form complexes.

[0842] If the nucleic acid sample originates from cells, the fixed and/or cross-linked complexes will be lysed. Lysis conditions can be chosen to maintain intact protein-DNA complexes. The lysate will be treated to fragment the DNA before affinity purification. If the nucleic acid sample originates from a cell-free sample, the cell-free nucleic acid will be treated to fragment the DNA. Suitable fragmentation techniques are described herein.

[0843] In some embodiments, the nucleic acid-targeting nucleic acid will comprise an affinity tag. The affinity tag will comprise a sequence that can bind to a conditionally enzymatically inactive site-directed polypeptide. In some instances, the affinity tag will comprise a sequence that can bind to a conditionally enzymatically inactive endoribonuclease. In some instances, the affinity tag will comprise a sequence that can bind to a conditionally enzymatically inactive Csy4 protein. The conditionally enzymatically inactive site-directed polypeptide will bind, but not cleave, the affinity tag. The affinity tag will comprise the nucleotide sequence 5′-GUUCACUGCCGUAUAGGCAGCUAAGAAA-3′ (SEQ ID NO: 1347). The affinity tag will be introduced into a nucleic acid using standard recombinant methods.

[0844] Once fragmented, the complexes comprising the site-directed polypeptide, the target nucleic acid, and/or the nucleic acid-targeting nucleic acid will be purified by incubation with a conditionally enzymatically inactive site-directed polypeptide (e.g., variant Csy4).

[0845] In some embodiments, the conditionally enzymatically inactive site-directed polypeptide will comprise an affinity tag.

[0846] The conditionally enzymatically inactive site-directed polypeptide will be purified with a solid support. The solid support will bind to the affinity tag of the conditionally enzymatically inactive site-directed polypeptide. For example, if the conditionally enzymatically inactive site-directed polypeptide comprises a biotin tag, the bead will be coated with avidin or streptavidin to bind the biotinylated capture agent.

[0847] In some embodiments, the enzymatically inactive site-directed polypeptide will be immobilized on any of a variety of insoluble support.

[0848] In some embodiments of the method, two rounds of purification will be performed. In some instances, a first round will comprise purification with a solid support that will bind to the affinity tag of the conditionally enzymatically inactive site-directed polypeptide (e.g., variant Csy4) and a second round will comprise purification with a solid support that will bind to the affinity tag of the site-directed polypeptide. In some instances, a first round will comprise purification with a solid support that will bind to the affinity tag of the site-directed polypeptide and a second round will comprise purification with a solid support that will bind to the affinity tag of the conditionally enzymatically inactive site-directed polypeptide (e.g., variant Csy4).

[0849] In some embodiments, the method will be used to optimize the binding specificity of a site-directed polypeptide by performing the method more than once.

[0850] The captured complex will comprise a site-directed polypeptide and a target nucleic acid. The target nucleic acid will be eluted from the site-directed polypeptide complex by standard methods including high salt washing, ethanol precipitation, boiling, gel purification, and the like.

[0851] The eluted DNA will be prepared for sequencing analysis. The sequencing libraries will be sequenced and analyzed to identify the sequence, and frequency of nuclease-binding sites.

### Example 13: Sequencing

[0852] The eluted target nucleic acids will be prepared for sequencing analysis. Preparation for sequencing analysis will include the generation of sequencing libraries of the eluted target nucleic acid. Sequencing analysis will determine the identity and frequency of off-target binding sites of site-directed polypeptides.

[0853] Sequence determination will also be performed using methods that determine many (typically thousands to billions) nucleic acid sequences in an intrinsically parallel manner, where many sequences are read out preferably in parallel using a high throughput serial process. Such methods include but are not limited to pyrosequencing (for example, as commercialized by 454 Life Sciences, Inc., Branford, Conn.); sequencing by ligation (for example, as commercialized in the SOLID™ technology, Life Technology, Inc., Carlsbad, Calif.); sequencing by synthesis using modified nucleotides (such as commercialized in TruSeq™ and HiSeq™ technology by Illumina, Inc., San Diego, Calif., HeliScope™ by Helicos Biosciences Corporation, Cambridge, Mass., and PacBio RS by Pacific Biosciences of California, Inc., Menlo Park, Calif.), sequencing by ion detection technologies (Ion Torrent, Inc., South San Francisco, Calif.); sequencing of DNA nanoballs (Complete Genomics, Inc., Mountain View, Calif.); nanopore-based sequencing technologies (for example, as developed by Oxford Nanopore Technologies, LTD, Oxford, UK), and other known highly parallelized sequencing methods.

### Example 14: Modification of a Target Nucleic Acid with an Effector Protein

[0854] A vector comprising a site-directed polypeptide, a nucleic acid-targeting nucleic acid, and/or an effector protein is introduced into a cell. Once inside the cell a complex is formed comprising the elements encoded in the vector. The nucleic acid-targeting nucleic acid is modified with a Csy4 protein binding sequence. The effector protein, Csy4, binds to the modified nucleic acid-targeting nucleic acid. Csy4 comprises a non-native sequence (e.g., a fusion), that modifies a target nucleic acid. The non-native sequence is a sequence that modifies the transcription of the target nucleic acid. The non-native sequence is a transcription factor. The transcription factor increases the level of transcription of the target nucleic acid. In some cases, the non-native sequence is a methylase. The methylase results in increases in methylation of the target nucleic acid. In some cases the non-native sequence is a demethylase. The demethylase results in decreases in methylation of the target nucleic acid. In some cases, the non-native sequence is a Rad51-recruiting peptide. The Rad51-recruiting peptide increases the level of homologous recombination at the target site. In some cases, the non-native sequence is a BCRA-2 recruiting peptide. The BRCA-2-recruiting peptide increases the level of homologous recombination at the target site.

### Example 15: Use of a Site-Directed Polypeptide as a Biosensor for a Genetic Mobility Event

[0855] A vector(s) comprising a site-directed polypeptide, a nucleic acid-targeting nucleic acid, and/or an effector protein is introduced into a cell. The site-directed polypeptide and effector proteins are fused to cellular localization sequences (e.g. a nuclear localization signal). Once inside the cell a complex is formed comprising the elements encoded in the vector(s). In some instances, two vectors are introduced into the cell. The vector(s) encodes for a first effector protein (Csy4) that comprises a first inactive portion of a split green fluorescent protein (GFP) and binds to a first nucleic acid-targeting nucleic acid and a second effector protein (Csy4, Cas5, or Cas6) that comprises a second inactive portion of the split GFP and binds to a second nucleic acid-targeting nucleic acid. The first nucleic acid-targeting nucleic acid is modified with a first Csy4, Cas5 or Cas6 protein binding sequence that can be bound by a first Csy4, Cas5 or Cas6 protein. The second nucleic acid-targeting nucleic acid is modified with a second Csy4, Cas5 or Cas6 protein binding sequence that can be bound by a second Csy4, Cas5 or Cas6 protein. In some embodiments, the first Csy4, Cas5 or Cas6 protein interacts with the first Csy4, Cas5 or Cas6 protein binding sequence, and the second Csy4, Cas5 or Cas6 protein interacts with the second Csy4, Cas5 or Cas6 protein binding sequence. When the first and second nucleic acid-targeting nucleic acids direct the site-directed polypeptide to bind to two sequences that are in close proximity, the first effector protein and the second effector protein will bring the first inactive portion of the split GFP into contact with the second inactive portion of the split GFP, to generate an active GFP. The nucleic acid-targeting nucleic acids of the complex are designed such that one nucleic acid-targeting nucleic acid guides the complex to, for example, a region at or near the Bcr gene, and another nucleic acid-targeting nucleic acid guides the complex to, for example, a region at or near the Ab1 gene. If a translocation event has not occurred the Bcr gene is on chromosome 22 and the Ab1 gene is on chromosome 9, and the target nucleic acid sequences are sufficiently far enough apart such that the two inactive portions of the split GFP system are unable to interact, thereby not generating a signal. If a translocation event has occurred, the Bcr gene and the Ab1 gene are translocated such that the genes are close together. In this instance, the target nucleic acid sequences are sufficiently close enough together such that the two inactive portions of the split GFP system come together to form an active GFP. A GFP signal can be detected by a fluorometer. The signal is indicative of a particular genotype resulting from the genetic mobility event.

### Example 16: Use of a Site-Directed Polypeptide as a Biosensor for a Genetic Mutation

[0856] The system described in Example 15 can also be used to detect the presence of specific mutation within a cell. In this example, a first nucleic-acid targeting nucleic acid is chosen to direct the site directed polynucleotide to a native sequence located near a mutation site. The second nucleic-acid targeting nucleic acid is chosen to recognize a mutant sequence (e.g., the mutant sequence having been identified by DNA sequencing). The nucleic-acid targeting nucleic acid is chosen such that the mutant sequence occurs within the first 12 nucleic acids immediately 5′ to the PAM sequence in the site. In this instance, the target nucleic acid sequences are sufficiently close enough together such that the two inactive portions of the split GFP system come together to form an active GFP. A GFP signal can be detected by a fluorometer. The signal is indicative of a particular genotype.

### Example 17: Use of a Site-Directed Polypeptide as a Therapeutic for Diseases that Comprise a Genetic Mobility Event

[0857] A vector(s) comprising a site-directed polypeptide, a nucleic acid-targeting nucleic acid, and/or an effector protein, a nucleic acid comprising a cell-lysis inducing peptide (e.g. Adenovirus death protein) operably linked to a first promoter will also be introduced into the cell. Once inside the cell a complex is formed comprising the elements encoded in the vector(s). In some instances, two vectors are introduced into the cell. The vector(s) encodes for a first effector protein (comprising a first Csy4, Cas5 or Cas6 protein sequence) that binds to a first nucleic acid-targeting nucleic acid and comprises an activator domain for a first transcription factor that binds to the first promoter and a second effector protein (comprising a second Csy4, Cas5 or Cas6 protein sequence) that binds to a second nucleic acid-targeting nucleic acid and comprises the DNA binding domain for the first transcription factor. The first nucleic acid-targeting nucleic acid is modified with a first Csy4, Cas5 or Cas6 protein binding sequence that can be bound by a first Csy4, Cas5 or Cas6 protein sequence. The second nucleic acid-targeting nucleic acid is modified with a second Csy4, Cas5 or Cas6 protein binding sequence that can be bound by a second Csy4, Cas5 or Cas6 protein. In some embodiments, the first Csy4, Cas5 or Cas6 protein interacts preferentially with the first Csy4, Cas5 or Cas6 protein binding sequence, and the second Csy4, Cas5 or Cas6 protein interacts preferentially with the second Csy4, Cas5 or Cas6 protein binding sequence. If a diseased cell comprises a genome containing a genetic mobility event, when the first and second nucleic acid-targeting nucleic acids direct the site-directed polypeptide to bind to two sequences that are in close proximity, the first effector protein and the second effector protein will bring the activator domain and the DNA-binding domain of the first transcription factor into close proximity. The DNA-binding domain of the first transcription factor can bind to the first promoter operably linked to the cell-lysis inducing peptide, and the proximal activator domain will induce transcription of RNA encoding the cell-lysis inducing peptide. In a non-diseased cell, that does not comprise the genetic mobility event, the DNA-binding domain and the activator domains of the first transcription factor will not be brought into close proximity, and there will be no transcription of the cell-lysis inducing peptide.

[0858] The nucleic acid-targeting nucleic acids of the complex are designed such that one nucleic acid-targeting nucleic acid guides the complex to, for example, a region at or near the Bcr gene, and another nucleic acid-targeting nucleic acid guides the complex to, for example, a region at or near the Ab1 gene. In a non-diseased cell, a translocation event has not occurred, the Bcr gene is on chromosome 22 and the Ab1 gene is on chromosome 9, and the target nucleic acid sequences are sufficiently far enough apart such that the two inactive portions of the transcription factor system are unable to interact, and cannot induce transcription of the cell-lysis inducing peptide. In a diseased cell, in which a translocation event has occurred, the Bcr gene and the Ab1 gene are translocated such that the genes are close together. In this instance, the target nucleic acid sequences are sufficiently close enough together such that the two inactive portions of the transcription factor system come together to induce transcription of the cell-death inducing peptide. Cell-lysis will be dependent upon a particular genotype resulting from the genetic mobility event.

### Example 18: Use of a Site-Directed Polypeptide as a Therapeutic for Diseases that Comprise a Genetic Mutation

[0859] The system described in Example 17 can also be used to detect the presence of specific mutation within a cell. In this example, the first nucleic-acid targeting nucleic acid is chosen to direct the site directed polynucleotide to a native sequence located near a mutation site. The second nucleic-acid targeting nucleic acid is chosen to recognize a mutant sequence (e.g., the mutant sequence having been identified by DNA sequencing). The nucleic-acid targeting nucleic acid is chosen such that the mutant sequence occurs within the first 12 nucleic acids immediately 5′ to the PAM sequence in the site. In this instance, the target nucleic acid sequences are sufficiently close enough together such that the two inactive portions of the transcription factor come together to enable transcription of a cell-lysis inducing peptide.

### Example 19: Recruiting the Immune System to Attack Diseased Tissue Containing a Genetic Mobility Event or a Genetic Mutation

[0860] The system described in Example 17 and/or 18 can also be used to direct transcription by the split transcription factor system that will result in the display of an antigen on the cell surface. In some instances, the antigen is a peptide displayed by MHC class II molecules. In some instances, the antigen is a cell-surface protein that recruits immune effector cells to the site.

### Example 20: Detecting Three-Dimensional Position of Nucleic Acids

[0861] A vector(s) comprising a site-directed polypeptide, a nucleic acid-targeting nucleic acid, and/or an effector protein is introduced into a cell. Once inside the cell a complex is formed comprising the elements encoded in the vector(s). Two vectors are introduced into the cell. One vector encodes for an effector protein (Csy4) that comprises a first inactive portion of a split affinity tag system. A second vector encodes for an effector protein (Csy4, Cas5, or Cas6) that comprises a second inactive portion of the split affinity tag. The nucleic acid-targeting nucleic acid of the complexes is modified with a Csy4, Cas5 or Cas6 protein binding sequence. The effector proteins bind to the modified nucleic acid-targeting nucleic acid. The nucleic acid-targeting nucleic acids are designed to guide the complexes to regions of interest in a three-dimensional nucleic acid structure (e.g., chromatin). If the target sequences are not close together in space, the two inactive portions of the split affinity tag are unable to interact. If the target sequences are close together in space, then the two inactive portions of the split affinity tag can come together to form the whole affinity tag.

[0862] The cells are lysed and the cell lysis is incubated with an antibody that binds to the affinity tag. The antibody is purified, thereby purifying the affinity tag and the nucleic acid to which the complexes are bound. The purified nucleic acid is dissociated from the complexes using high salt wash. The dissociated purified nucleic acid is prepared for sequencing analysis, and sequenced. The sequencing results correspond to regions of chromatin that are close together in three-dimensional space. The sequencing results can be used to further understand gene expression and treat disease.

### Example 21: Multiplex Genome Engineering

[0863] A vector comprising a multiplexed genetic targeting agent comprising nucleic acid modules which comprise a nucleic acid-targeting nucleic acid and an endoribonuclease binding sequence is introduced into a cell. In some embodiments, the cell already comprises a site-directed polypeptide and an endoribonuclease. In some instances, the cell is contacted with a vector comprising a polynucleotide sequence encoding a site-directed polypeptide and a vector comprising a polynucleotide sequence encoding an endoribonuclease. In some instances, the cell is contacted with a vector comprising a polynucleotide sequence encoding both the site-directed polypeptide and the endoribonuclease. In some embodiments, the vector comprises a polynucleotide sequence encoding one or more endoribonucleases. In some embodiments, the vector comprises a polynucleotide sequence encoding a multiplexed genetic targeting agent, a site-directed polypeptide, and one or more endoribonucleases. The array is transcribed into RNA. The one or more endoribonucleases binds to the one or more endoribonuclease binding sequences in the multiplexed genetic targeting agent. The one or more endoribonucleases cleaves the one or more endoribonuclease binding sequences in the multiplexed genetic targeting agent, thus liberating the individual nucleic acid modules. In some embodiments, the nucleic acid modules comprise all, some, or none, of the endoribonuclease binding sequence.

[0864] The liberated nucleic acid modules bind to site-directed polypeptides, thereby forming complexes. The complexes are targeted to one or more target nucleic acids. The one or more nucleic acid modules hybridizes to the one or more target nucleic acids. The one or more site-directed polypeptides cleaves the one or more target nucleic acids at a cleavage site defined by the nucleic acid module, thus resulting in one or more modified target nucleic acids.

[0865] In some embodiments, one or more donor polynucleotides and/or vectors encoding the same are introduced into the cell. One or more donor polynucleotides are incorporated into the one or more cleaved target nucleic acids, thereby resulting in one or more modified target nucleic acids (e.g., addition). In some instances, the same donor polynucleotide is incorporated into multiple cleavage sites. In some instances, one or more donor polynucleotides are incorporated into multiple cleavage sites. In some instances, no donor polynucleotide and/or vector encoding the same are introduced into the cells. In these instances, the modified target nucleic acid can comprise a deletion.

### Example 22: Method of Stoichiometric Delivery of RNA to A Cell

[0866] In some embodiments, the disclosure provides for a method for stoichiometric delivery of nucleic acids to the nucleus of a cell. In some embodiments, three stoichiometrically deliverable nucleic acid are used: one encoding for Cas9, one encoding for a nucleic-acid targeting nucleic acid, and one encoding Csy4. Each of the three nucleic acids comprises a Csy4-binding site.

[0867] In some embodiments, the method provides for a tandem fusion polypeptide. The fusion polypeptide comprises three Csy4 polypeptides. The three Csy4 polypeptides are separated by a linker. The three Csy4 polypeptides bind to the Csy4-binding sites on each of the three nucleic acid molecules, thereby forming a complex.

[0868] In some embodiments, the complex is formed outside of a cell and introduced into the cell. The complex is formed by mixing the three stoichiometrically deliverable nucleic acids and the fusion protein and letting the reaction occur to allow binding between the tandem fusion polypeptide and three Csy4-binding sites. The complex is introduced by injection, electroporation, transfection, transformation, viral transduction, and the like. Inside the cell, some of the nucleic acids of the complex are translated. In some embodiments, the resulting translation products are Csy4 and NLS-Cas9 (e.g., Cas9 comprising an NLS. The NLS may not have to be at the N-terminus). The Csy4 cleaves the Csy4-binding site on the nucleic acid encoding the nucleic acid-targeting nucleic acid, thereby liberating the nucleic acid-targeting nucleic acid from the tandem fusion polypeptide. NLS-Cas9 binds the liberated nucleic acid-targeting nucleic acid, thereby forming a unit. This unit translocates to the nucleus. Inside the nucleus, the unit is guided to a target nucleic acid that hybridizes with the spacer of the nucleic acid-targeting nucleic acid. The Cas9 of the unit cleaves the target nucleic acid. The cleavage of the target nucleic acid by Cas9 is referred to as genome engineering.

[0869] In some embodiments, the complex is formed inside of a cell. A vector encoding the three stoichiometrically deliverable nucleic acids is introduced into the cell. Three different vectors encoding one of each of the three stoichiometrically deliverable nucleic acids is introduced the cell. Two vectors are introduced into the cell, wherein one of the two vectors encodes for two stoichiometrically deliverable nucleic acids and one of the two vectors encodes for one stoichiometrically deliverable nucleic acid. Any of the vectors can encode the tandem fusion polypeptide.

[0870] Inside the cell, vector nucleic acid encoding RNA or a polypeptide is transcribed into RNA. A complex comprising the three nucleic acids and the tandem fusion polypeptide is formed, whereby each of the Csy4-binding proteins binds to the Csy4-binding site on each of the three nucleic acids. The nucleic acids of the complex are translated. In some embodiments, the resulting translation products are Csy4 and NLS-Cas9 (e.g., Cas9 comprising an NLS. The NLS may not have to be at the N-terminus). The Csy4 cleaves the Csy4-binding site on the nucleic acid encoding the nucleic acid-targeting nucleic acid, thereby liberating the nucleic acid-targeting nucleic acid from the tandem fusion polypeptide. NLS-Cas9 binds the liberated nucleic acid-targeting nucleic acid, thereby forming a unit. This unit translocates to the nucleus. Inside the nucleus, the unit is guided to a target nucleic acid that hybridizes with the spacer of the nucleic acid-targeting nucleic acid. The Cas9 of the unit cleaves the target nucleic acid.

### Example 23: Method of Stoichiometric Delivery of Multiple Nucleic Acid-Targeting Nucleic Acids to a Cell

[0871] In some embodiments, the disclosure provides for a method for stoichiometric delivery of a plurality of nucleic acids to a cell, wherein some of the plurality of nucleic acids are nucleic acid-targeting nucleic acids. In some embodiments, the plurality of nucleic acids comprises four nucleic acids: one encoding for Cas9, two encoding for nucleic-acid targeting nucleic acids, and one encoding for Csy4.

[0872] The nucleic acids comprise two or more nucleic acid-binding protein binding sites. In some instances, the first nucleic acid-binding protein binding site (e.g., the more 5′ site) comprises a Csy4 binding site. In some instances, the second nucleic acid-binding protein binding site (e.g., the more 3′ site) comprises a different nucleic acid-binding protein binding site (e.g., MS2 binding site). In some instances, the second nucleic acid-binding protein binding site from each of the stoichiometrically deliverable nucleic acids is different. For example, the second nucleic acid-binding protein binding site can be a site that binds one of a CRISPR polypeptide (e.g., Cas5, Cas6) In some instances, the nucleic acid encoding Cas9 also comprises a nuclear localization signal (NLS).

[0873] In some embodiments, the tandem fusion polypeptide comprises three nucleic acid-binding proteins. The three nucleic acid-binding proteins are Csy4, Cas5, Cas6. The tandem fusion polypeptide comprises a nuclear localization signal. The tandem fusion polypeptides comprise more than one copy of a nucleic acid-binding protein (e.g., 2 copies of Csy4, one copy of Cas5, one copy of Cas6).

[0874] In some embodiments, a complex comprising the tandem fusion protein and the four nucleic acids is formed outside of a cell. The complex is formed by mixing the four nucleic acids and the tandem fusion protein and letting the reaction occur to allow binding between the tandem fusion polypeptide and four nucleic acid-binding protein binding sites. The complex is introduced into the cell. Introduction occurs by either transformation, transfection, viral transduction, microinjection, or electroporation, or any technique capable of introducing biomolecules across a cell membrane. The complex is formed inside the cell (e.g., after introduction of vectors comprising nucleic acid sequences encoding the nucleic acids and tandem fusion protein).

[0875] Inside the cell, the nucleic acids encoding Csy4 and Cas9 are translated, resulting in Csy4 and NLS-Cas9 (e.g., Cas9 comprising an NLS. The NLS may not have to be at the N-terminus). Csy4 cleaves the Csy4-binding site on the nucleic acids encoding the nucleic acid-targeting nucleic acids, thereby liberating them from the tandem fusion polypeptide.

[0876] NLS-Cas9 binds the liberated nucleic acid-targeting nucleic acids, thereby forming a plurality units. The units translocate to the nucleus. Inside the nucleus, the units are guided to a target nucleic acid that hybridizes with the spacer of the nucleic acid-targeting nucleic acid of the unit. The Cas9 of the unit cleaves the target nucleic acid.

### Example 24: Method of Stoichiometric Delivery of RNA and A Donor Polynucleotide

[0877] The disclosure provides for a method of stoichiometric delivery of RNA components that can be used in genome engineering. The method can also comprise delivery of a donor polynucleotide that can be inserted into a site of genome engineering.

[0878] The disclosure provides for a method for stoichiometric delivery of a plurality of RNAs and a donor polynucleotide to a cell. In some embodiments, the plurality of RNAs comprises three RNAs and a DNA. In some instances, the three RNAs are: one encoding for Cas9, one encoding for Csy4, and one encoding for a nucleic acid-targeting nucleic acid. The DNA is a DNA encoding a donor polynucleotide.

[0879] In some instances, the RNAs comprise a plurality of nucleic acid-binding protein binding sites (e.g., two nucleic acid-binding protein binding sites). The first nucleic acid-binding protein binding site (e.g., the more 5′ site) comprises a Csy4 binding site. The second nucleic acid-binding protein binding site (e.g., the more 3′ site comprises a different nucleic acid-binding protein binding site). The second nucleic acid-binding protein binding site in each of the nucleic acids of the disclosure is different. For example, the second nucleic acid-binding protein binding site binds a CRISPR polypeptide (e.g., Cas5, Cas6) and/or a DNA binding protein (e.g., a zinc finger protein). The nucleic acids of the method also comprise a sequence encoding for a nuclear localization signal (e.g., the RNA encoding Cas9, and the DNA encoding a donor polynucleotide).

[0880] In some embodiments, the tandem fusion polypeptide comprises four nucleic acid-binding proteins (e.g., RNA-binding proteins and DNA-binding proteins). In some instances, three nucleic acid-binding proteins are Csy4, Cas5, Cas6, and the fourth nucleic acid-binding protein is a DNA-binding protein (e.g., zinc finger protein). In some instances, the tandem fusion polypeptide comprises a nuclear localization signal.

[0881] In some embodiments, a complex comprising the tandem fusion protein and the nucleic acids (e.g., three RNAs and one DNA) is formed outside of a cell. The complex is formed by mixing the nucleic acids (e.g., three RNAs and one DNA) and the tandem fusion protein and letting the reaction occur to allow binding between the tandem fusion polypeptide and four RNA-binding protein binding sites. The complex can be introduced into the cell. The complex is formed inside the cell (e.g., after introduction of vectors comprising nucleic acid sequences encoding the nucleic acids and tandem fusion protein).

[0882] Inside the cell, the RNAs encoding Csy4 and Cas9 are translated, resulting in Csy4 and NLS-Cas9 (e.g., Cas9 comprising an NLS. The NLS may not have to be at the N-terminus as written here). Csy4 can cleave the Csy4-binding site on the RNAs encoding the nucleic acid-targeting nucleic acid and the DNA, thereby liberating them from the tandem fusion polypeptide. In some instances, the liberated donor polynucleotide translocates to the nucleus by its nuclear localization signal.

[0883] NLS-Cas9 binds the liberated nucleic acid-targeting nucleic acid, thereby forming a unit. The unit translocates to the nucleus. Inside the nucleus, the unit is guided to a target nucleic acid that hybridizes with the spacer of the nucleic acid-targeting nucleic acid of the unit. The Cas9 of the unit cleaves the target nucleic acid. The donor polynucleotide, a portion of the donor polynucleotide, a copy of the donor polynucleotide, or a portion of a copy of the donor polynucleotide can be inserted into the cleaved target nucleic acid.

### Example 25: Seamless Selection of Genetically Modified Cells

[0884] A plurality of cells is contacted with a vector comprising sequences encoding a polypeptide homologous to Cas9, a nucleic acid-targeting nucleic acid and a donor polynucleotide. In some cases, one or more of the sequences encoding the polypeptide homologous to Cas9, the nucleic acid-targeting nucleic acid and the donor polynucleotide are located on different vectors. e cells are transfected with the vector. In some instances, the cells are infected with a virus carrying the vector. In some instances, the cell already comprises a protein homologous to Cas9 and the vector does not encode this polypeptide. In some instances, the cell already comprises a CRISPR system (e.g. Cas proteins, crRNA and tracrRNA) and the vector only encodes the donor polynucleotide. The donor polynucleotide comprises sequences encoding a genetic element of interest and a reporter element. The reporter element comprises nucleic acid-targeting nucleic acid sequences, a protein homologous to Cas 9 and a fluorescent protein. The nucleic acid-targeting nucleic acid guide Cas9 to a target nucleic acid (e.g. a site in the host cell genome), resulting in a double-stranded DNA break of the target nucleic acid and insertion of the donor polynucleotide. Insertion of the donor polynucleotide is screened for by screening for the reporter. In some cases, screening comprises fluorescence-activated cell sorting. Screening comprises multiple selection methods. Cas9 and/or the nucleic acid-targeting nucleic acids are controlled by an inducible promoter. After selecting a population of cells that comprise the reporter signal, the reporter element is removed by activating the inducible promoter, which transcribes the nucleic acid-targeting nucleic acids and the site-directed polypeptide of the donor polynucleotide. The transcribed nucleic acid-targeting nucleic acids and the transcribed site-directed polypeptide can form complexes. One complex can be targeted to the 3′ end of the reporter element of the donor polynucleotide. One complex can be targeted to the 5′ end of the reporter element of the donor polynucleotide. The 3′ and 5′ ends of the reporter element can be cleaved. The cleaved target nucleic acid can be rejoined by cellular mechanisms, thereby resulting in an in-frame nucleic acid sequence encoding the same nucleic acid sequence as prior to insertion of the donor polynucleotide. In this way, the reporter element is seamlessly inserted and removed from cells.

### Example 26: Method for Cas9 Cleavage Using Engineered Nucleic Acid-Targeting Nucleic Acids

### Reagents

[0885] pCB002 plasmid containing temp3 target DNA sequence was digested with 1U of AscI per lug of DNA to linearize the vector. The reaction was stopped by incubating reaction mix at 80° C. for 20 min. Reaction was then purified using Qiagen PCR clean up kit.

[0886] Single guide nucleic acids were generated using T7 High Yield RNA Synthesis Kit (Cat No. E2040S), using half the volume of reagents recommended by the manufactures for RNA of >300 nucleotides. Generally between 200-350 ng of template were used in a 20 uL reaction that incubates for 16 hours. Samples were treated with DNase, and purified using Thermo GeneJet RNA purification Kit (Cat No. K0732), and eluted in 20 uL. Typical yields range from 1.4-2 ug/uL.

[0887] At the start of cleavage assay set-up, all sgRNA were diluted to 3500 nM concentration and heat shocked at 80° C. for 15 minutes. Samples were removed from heating element and allowed to equilibrate to room temperature. An aliquot of 4 μL of single guide nucleic acid-targeting nucleic acid can be run out on an agarose gel to confirm RNA integrity.

[0888] Aliquots of Cas9 at 2-2.5 mg/mL were removed from freezer and thawed as quickly as possible and then diluted in 1×cleavage buffer to appropriate stock concentration.

### Cleavage Assay

[0889] A master mix of water, 5×cleavage buffer of (100 mM HEPES, 500 mM KCl, 25 mM MgCl2, 5 mM DTT, and 25% glycerol at pH 7.4), and Cas9 to 250 nM was aliquoted into thin wall PCR tubes. sgRNA was added to appropriate tubes at a final concentration of 250 nM.

[0890] The reaction was incubated at 37° C. for 10 minutes, 10 nM linearized plasmid was added and reactions (final reaction volume 20 uL) were incubated at 37° C. for and hour. The reaction was terminated by heating reaction to 60° C. for 20 minutes. 10 μL aliquots were mixed with 2 uL 6×DNA loading dye and analyzed by electrophoresis on a 1.5% agarose gel stained with SYBR safe. The appearance of a ˜2800 bp and ˜1300 bp fragments was indicative of Cas9 mediated cleavage. The results of the experiments are shown in FIG. 23A, FIG. 23B, and FIG. 23C. All synthetic guide RNA sequences designed and shown in FIG. 22A and FIG. 22B supported sgRNA cleavage, except for SGRv8, in which the entire complementary region was inverted. These results indicate that different regions of the sgRNA can be amenable to engineering and still retain function.

[0891] Engineered nucleic acid-targeting nucleic acids were tested in the assay described above. FIGS. 22A and 22B shows the designs of an initial set of duplex variants in single-guide nucleic acid-targeting nucleic acid backbone variants used to test targeting and cleavage activity.

[0892] FIG. 24 and FIG. 25 illustrate a second set of duplex variants with smaller modifications in the duplex. V28 comprises a 2 base insertion 3′ to the complementary region; V29 comprises a 3 base deletion 3′ to the complementary region.

[0893] FIG. 26A and FIG. 26B illustrate tracr variants which comprise mutations in the tracrRNA portion of the nucleic acid-targeting nucleic acid (i.e., minimum tracrRNA sequence and 3′ tracrRNA sequence). V38-V41 comprise fusions between the complementary region/duplex and the 3′ ends of the tracr nucleic acid sequences from M. mobile 163K (v38), S. thermophilus LMD-9 (V39), C. jejuni (V40), and N. meningitides.

[0894] FIG. 27A and FIG. 27B depict variants comprising modifications to enable Csy4 binding to the nucleic acid-targeting nucleic acid. The additional hairpin sequences are derived from the CRISPR repeat in Pseudomonas acruginosa PA14.

[0895] FIG. 23A, FIG. 23B, and FIG. 23C show data from the in vitro cleavage assay demonstrating the activity of the nucleic acid-targeting nucleic acid variants on Cas9 cleavage. Variant SGRv8 failed to support target nucleic acid cleavage (FIG. 23B lane 9).

[0896] FIG. 28 and FIG. 29 show two independent repeats of the Cas9 cleavage assay testing the variants depicted in FIGS. 24, 25, 26A, 26B, 27A, and 27B.

[0897] Additional engineered nucleic acid-targeting nucleic acids were made as listed in Table 5, and tested in the same assay. The results of the assay are shown in FIGS. 37A, 37B, 37C, and 37D and listed in the activity column of Table 5.

[0898] The results of these experiments indicate the importance of the bulge and P-domain regions in effecting target nucleic acid cleavage. The functionality of variants 42-45 indicates that the addition of a Csy4 binding sequence to a nucleic acid-targeting nucleic acid does not disrupt target nucleic acid cleavage.

### Example 27: Sequencing Analysis Systems

[0899] FIG. 30 depicts a system that is configured to implement the methods of the disclosure. The system can include a computer server (“server”) that is programmed to implement the methods described herein. FIG. 30 depicts a system 3000 adapted to enable a user to detect, analyze, and communicate sequencing results of for example, nuclease-targeted enriched nucleic acids, sequenced target nucleic acids, data concerning the methods of the disclosure, diagnose a disease, genotype a patient, make a patient-specific treatment decision, or any combination thereof. The system 3000 includes a central computer server 3001 that is programmed to implement exemplary methods described herein. The server 3001 includes a central processing unit (CPU, also “processor”) 3005 which can be a single core processor, a multi core processor, or plurality of processors for parallel processing. The server 3001 also includes memory 3010 (e.g. random access memory, read-only memory, flash memory); electronic storage unit 3015 (e.g. hard disk); communications interface 3020 (e.g. network adaptor) for communicating with one or more other systems; and peripheral devices 3025 which may include cache, other memory, data storage, and/or electronic display adaptors. The memory 3010, storage unit 3015, interface 3020, and peripheral devices 3025 are in communication with the processor 3005 through a communications bus (solid lines), such as a motherboard. The storage unit 3015 can be a data storage unit for storing data. The server 3001 is operatively coupled to a computer network (“network”) 3030 with the aid of the communications interface 3020. The network 3030 can be the Internet, an intranet and/or an extranet, an intranet and/or extranet that is in communication with the Internet, a telecommunication or data network. The network 3030 in some cases, with the aid of the server 3001, can implement a peer-to-peer network, which may enable devices coupled to the server 3001 to behave as a client or a server. The microscope and micromanipulator can be peripheral devices 3025 or remote computer systems 3040.

[0900] The storage unit 3015 can store files, such as sequencing results, target binding sites, personalized genetic data, genotypes, images, data analysis of images and/or sequencing results, or any aspect of data associated with the disclosure.

[0901] The server can communicate with one or more remote computer systems through the network 3030. The one or more remote computer systems may be, for example, personal computers, laptops, tablets, telephones, Smart phones, or personal digital assistants.

[0902] In some situations the system 3000 includes a single server 3001. In other situations, the system includes multiple servers in communication with one another through an intranet, extranet and/or the Internet.

[0903] The server 3001 can be adapted to store sequencing results, target binding sites, personalized genetic data, and/or other information of potential relevance. Such information can be stored on the storage unit 3015 or the server 3001 and such data can be transmitted through a network.

[0904] Methods as described herein can be implemented by way of machine (or computer processor) executable code (or software) stored on an electronic storage location of the server 001, such as, for example, on the memory 3010, or electronic storage unit 3015. During use, the code can be executed by the processor 3005. In some cases, the code can be retrieved from the storage unit 3015 and stored on the memory 3010 for ready access by the processor 3005. In some situations, the electronic storage unit 3015 can be precluded, and machine-executable instructions are stored on memory 3010. Alternatively, the code can be executed on a second computer system 3040.

[0905] Aspects of the systems and methods provided herein, such as the server 3001, can be embodied in programming. Various aspects of the technology may be thought of as “products” or “articles of manufacture” typically in the form of machine (or processor) executable code and/or associated data that is carried on or embodied in a type of machine readable medium. Machine-executable code can be stored on an electronic storage unit, such memory (e.g., read-only memory, random-access memory, flash memory) or a hard disk. “Storage” type media can include any or all of the tangible memory of the computers, processors or the like, or associated modules thereof, such as various semiconductor memories, tape drives, disk drives and the like, which may provide non-transitory storage at any time for the software programming. All or portions of the software may at times be communicated through the Internet or various other telecommunication networks. Such communications, for example, may enable loading of the software from one computer or processor into another, for example, from a management server or host computer into the computer platform of an application server. Thus, another type of media that may bear the software elements includes optical, electrical, and electromagnetic waves, such as used across physical interfaces between local devices, through wired and optical landline networks and over various air-links. The physical elements that carry such waves, such as wired or wireless likes, optical links, or the like, also may be considered as media bearing the software. As used herein, unless restricted to non-transitory, tangible “storage” media, terms such as computer or machine “readable medium” refer to any medium that participates in providing instructions to a processor for execution.

[0906] Hence, a machine readable medium, such as computer-executable code, may take many forms, including but not limited to, tangible storage medium, a carrier wave medium, or physical transmission medium. Non-volatile storage media can include, for example, optical or magnetic disks, such as any of the storage devices in any computer(s) or the like, such may be used to implement the system. Tangible transmission media can include: coaxial cables, copper wires, and fiber optics (including the wires that comprise a bus within a computer system). Carrier-wave transmission media may take the form of electric or electromagnetic signals, or acoustic or light waves such as those generated during radio frequency (RF) and infrared (IR) data communications. Common forms of computer-readable media therefore include, for example: a floppy disk, a flexible disk, hard disk, magnetic tape, any other magnetic medium, a CD-ROM, DVD, DVD-ROM, any other optical medium, punch cards, paper tame, any other physical storage medium with patterns of holes, a RAM, a ROM, a PROM and EPROM, a FLASH-EPROM, any other memory chip or cartridge, a carrier wave transporting data or instructions, cables, or links transporting such carrier wave, or any other medium from which a computer may read programming code and/or data. Many of these forms of computer readable media may be involved in carrying one or more sequences of one or more instructions to a processor for execution.

### Example 28: Array-Based Sequencing Using a Site-Directed Polypeptide

[0907] A nucleic acid sample is ligated with a nucleic acid tag comprising a single guide RNA and a detectable label. Together, the nucleic acid sample ligated to the nuclei acid tag is referred to as a tagged test sample. The tagged test sample is contacted to a microarray comprising immobilized oligonucleotides. The immobilized oligonucleotides are a double-stranded nucleic acid library. The oligonucleotides comprise a detectable label (e.g., fluorescent label. The individual members of the tagged test sample hybridize to the oligonucleotides to which they share enough complementarity to facilitate hybridization. The amount of hybridization can be quantified by comparing the intensities of the two detectable labels from the sample library and the immobilized oligonucleotides. For example, hybridized oligonucleotides can display two detectable labels (that from the sample library and the oligonucleotide). Unhybridized oligonucleotides can display one detectable label (that from the oligonucleotide). The hybridized probes are contacted with Cas9. Cas9 cleaves the oligonucleotides in the microarray that have hybridized with members of the tagged test sample. Cleavage by the site-directed polypeptide allows the hybridized members of the tagged test sample to be removed. After cleavage by the site-directed polypeptide, only unhybridized oligonucleotide detectable labels remain on the microarray. The remaining detectable label is quantified. The quantification of the remaining detectable labels is correlated to which sequences were represented in the nucleic acid sample and which were not (e.g., by position mapping). Oligonucleotides that do not display a remaining detectable label correspond to sequences that were represented in the nucleic acid sample. Oligonucleotides that display a remaining detectable label correspond to sequences that were not represented in the nucleic acid sample.

### Example 29: Cleavage of a Target Nucleic Acid with A Tagged Nucleic Acid-Targeting Nucleic Acid

[0908] This example describes the results of target nucleic acid cleavage with a nucleic acid-targeting nucleic acid comprising a Csy4 binding sequence on the 5′ end of the nucleic acid-targeting nucleic acid. Cas9 was incubated with or without a guide RNA targeting a single site in a linear double-stranded DNA sequence. After 1 hour, cleavage products were separated and visualized on an agarose gel. FIG. 13D illustrates that Cas9 cleavage mediated by a tagged nucleic acid-targeting nucleic acid (lane 3) was less efficient than Cas9 cleavage mediated by an untagged nucleic acid-targeting nucleic acid (lane 1). After 1 hour, ˜100% of the target was cleaved by Cas9 guided by the untagged nucleic acid-targeting nucleic acid, where as only a small fraction of the target was cleaved in the same time by Cas9 guided by the tagged nucleic acid-targeting nucleic acid. These experiments indicate the location of the non-native sequence can be used to tune cleavage effectiveness of cleavage of the Cas9: nucleic acid-targeting nucleic acid complex. For example, FIG. 27A, FIG. 27B, and FIG. 29 show the functionality of the addition of a Csy4 binding sequence to various locations in the nucleic acid-targeting nucleic acid that retain activity.

### Example 30: Genome Engineering Genes in Blood Disorders

[0909] A nucleic acid-targeting nucleic acid comprising a spacer sequence described in Table 2 is introduced into a cell with a site-directed polypeptide, thereby forming a complex. The complex targets the gene involved in a blood disorder that has substantial complementarity to the spacer sequence of the nucleic acid-targeting nucleic acid. Once the nucleic acid-targeting nucleic acid is hybridized to the target nucleic acid the site-directed polypeptide cleaves the target nucleic acid. The cleaved target nucleic acid is can be engineered with a donor polynucleotide.

### Example 31: Protocol to Determine Target Nucleic Acid Cleavage and Modification

[0910] This protocol can be used to determine if a target nucleic acid has been cleaved or if the target nucleic acid has been modified such as with an insertion or deletion. Primers surrounding the target site are used to PCR amplify, in a 25 uL reaction, a 500-600 nt product from gDNA. The primers comprise at least 100 nt on either side of the cut site. The resulting products from the cleavage assay are about greater than 100 nt.

[0911] About 5 μL of PCR product is run on an agarose gel to determine if amplification is clean. With the remaining PCR product the melt and annealing protocol is as follows:

| | | |
|---|---|---|
| 95° C. | 10 | min |
| 95° C. to 85° C. | (−2.0° | C./s) |
| 85° C. | 1 | min |
| 85° C. to 75° C. | (−0.3° | C./s) |
| 75° C. | 1 | min |
| 75° C. to 65° C. | (−0.3° | C./s) |
| 65° C. | 1 | min |
| 65° C. to 55° C. | (−0.3° | C./s) |
| 55° C. | 1 | min |
| 55° C. to 45° C. | (−0.3° | C./s) |
| 45° C. | 1 | min |
| 45° C. to 35° C. | (−0.3° | C./s) |
| 35° C. | 1 | min |
| 35° C. to 25° C. | (−0.3° | C./s) |
| 25° C. | 1 | min |

| | |
|---|---|
| 4° C. | Hold |

[0912] A T7E1 Master Mix of water, NEB2 buffer, and T7E1 enzyme is prepared. Multiply for each reaction, plus extra. Table 8 shows the components of the T7E1 master mix.

TABLE 8
Reaction components for T7E1 Master Mix.

| | 1X reaction |
|---|---|
| Water | 7.5 μL |
| NEB 2 buffer | 2 μL |
| T7E1 enzyme | 0.5 μL |
| PCR product | 10 μL |
| Total | 20 μL |

[0913] To each reaction, in a 200 uL strip cap tube, the following reagents are added: T7E1 master mix (10 uL), and PCR sample (10 uL). The reaction is incubated at 37° C. for 25 minutes.

[0914] Loading buffer is added to the sample and the entire sample is run on a 3% gel at 120 V for 20 minutes. The gel may be run longer if more resolution is required. Image and save the gel image.

[0915] The image is quantified to determine the amount of cleavage of the target nucleic acid.

### Example 32: Cellular Testing of Nucleic Acid-Targeting Nucleic Acid Variants

[0916] This example shows that nucleic acid-targeting nucleic acid variants depicted in FIGS. 22A, 22B, 24, 25, and Example 26 were tested in a cell-based assay to determine if the in vitro functionality determined in Example 26 matched in vivo functionality. HEK293 cells were grown to 60-70% confluence in 10 cm dishes. Cells were removed by trypsinization, counted using a hemocytometer and then separated in to aliquots of 7×10⁴ cells for each well to be transfected. For each well, 250 ng pCB045 plasmid expressing mammalian codon-optimized Cas9 was mixed with 30 ng guide RNA and 40 ng copGFP DNA and 0.5 ul Lipofectamine 2000 in a final volume of 50 ul DMEM. DNA and lipid were incubated for 15 minutes prior to transfection. Transfections were carried out at the time of plating, by adding the lipid: DNA mix to 450 ul DMEM+10% Fetal Bovine Serum containing 7×10⁴ cells. The transfection/cell mix was added to 96 well tissue culture plates coated with Rat Tail Collagen I. Cells were incubated at 37° C. in an incubator with 5% CO₂ for 40 hours.

[0917] Media was removed from each of the wells and cells were lysed using Quickextract solution (Epicentre) according to manufacturer's instructions. DNA harvested from QuickExtract lysis was diluted 1:10 and used as a template in PCR reactions for T7E1 assays as described in Example 30.

[0918] FIG. 36 indicates that all variants except v8 and v9 were able to cleave target nucleic acid. Nucleic acid-targeting nucleic acid variant v8 was also substantially inactive in in vitro assays as depicted in FIG. 23B. Nucleic acid-targeting nucleic acid variant v9 was very weakly active in the in vitro assay depicted in FIG. 23B.

### Example 33: Determining a Cell Fate with a Tagged Cell

[0919] This example describes how to track a cell developing from a cell lineage. A hematopoietic stem cell (e.g., a hemocytoblast) is contacted with a site-directed polypeptide, a nucleic acid-targeting nucleic acid, and a donor polynucleotide. The site-directed polypeptide and nucleic acid-targeting nucleic acid form a complex and target a region of the hematopoietic genome for cleavage. Once cleaved, the donor polynucleotide is inserted into the cleaved site in the hematopoietic cell's genome. The hematopoietic stem cell is induced to differentiate through normal differentiation processes. At different stages of differentiation the sample comprising the differentiated hematopoietic cells can be assayed for the presence of the donor polynucleotide. In this way, the differentiation process of a cell can be tracked.

### Example 34: Clone Double-Stranded Oligonucleotide Encoding a Nucleic Acid-Targeting Nucleic Acid into a Linearized Vector

[0920] This example describes how to generate a double-stranded oligonucleotide encoding a portion of nucleic acid-targeting nucleic acid (e.g., a spacer) and insert it into a linearized vector. The linearized vector or a closed supercoiled vector comprises a sequence encoding a site-directed polypeptide (e.g., Cas9), a promoter driving expression of the sequence encoding the site-directed polypeptide (e.g., CMV promoter), a sequence encoding a linker (e.g., 2A), a sequence encoding a marker (e.g., CD4 or OFP), a sequence encoding portion of a nucleic acid-targeting nucleic acid, a promoter driving expression of the sequence encoding a portion of the nucleic acid-targeting nucleic acid, and a sequence encoding a selectable marker (e.g., ampicillin), or any combination thereof.

[0921] Equal amounts of two single-stranded oligonucleotides are annealed together (e.g., 50 micromolar). The two single-stranded oligonucleotides can hybridize together. At least one of the two single-stranded oligonucleotides is complementary to a target nucleic acid (e.g., a 10-30 nucleotide region adjacent to a protospacer adjacent motif in a target). At least one of the two single-stranded nucleotides comprises a 3′ overhang sequence comprising the sequence 5′-GTTT-3′. At least one of the two single-stranded oligonucleotides comprises a 3′ overhang comprising the sequence 5′-CGGTG-3′. In some instances, one of the two single-stranded oligonucleotides comprises a 5′-GTTT-3′ overhang and the other of the two single-stranded oligonucleotides comprises a5′-CGGTG-3′. Annealing is performed in an annealing buffer comprising at least 10 mM tris HCl pH 8.0, 1 mM EDTA, pH 8.0, and 100 mM NaCl. Annealing is performed by heating the oligonucleotide mixture at 95° C. for 3-5 minutes, removing the oligonucleotide mixture from the heating source, and allowing the mixture to cool to room temperature for 5-10 minutes. The double-stranded oligonucleotide mixture is centrifuged gently. After annealing the mixture may be stored at 4° C. or −20° C. The mixture, now of double-stranded oligonucleotides, is diluted to prepare two stock solutions of 500 nanomolar and 5 nanomolar. The stock solutions are prepared by diluting the oligonucleotide mixture in water.

[0922] The double-stranded oligonucleotide (dsOligonucleotide) is ligated into a linearized vector. The linearized vector comprises a sequence encoding a site-directed polypeptide (e.g., Cas9), a marker protein (e.g., orange fluorescent protein), and/or a sequence encoding a nucleic acid-targeting nucleic acid, wherein the linearized vector is linearized at a region of the sequence encoding the nucleic acid-targeting nucleic acid, such that the sticky ends generated match the overhang ends of the dsOligonucleotide. The ligation reaction can comprise 1×ligation buffer (e.g., 50 mM Tris-HCl pH 7.6, 5 mM MgCl2, 1 mM ATP, 1 mM DTT, and/or 5% PEG 8000), 30 nanogram linearized vector, 5 nM dsOligonucleotide, and DNA ligase (e.g., 4 microliters 5×ligation buffer, 2 microliters linearized vector at 15 nanogram/microliter, 2 microliters 5 nanomolar dsOligonucleotide, 11 microliters water, 1 microliter T4 DNA ligase). The reaction is mixed. The reaction is incubated at room temperature for 10 minutes-2 hours. The reaction is placed on ice and transformed into competent cells.

[0923] Transformation into competent cells comprises transforming into chemically competent TOP10 E. coli cells. Competent cells are thawed on ice. 3 microliters of the reaction mixture is added to the competent cells and mixed gently. The cells are incubated on ice for 10-30 minutes. The cells are heat-shocked for 30 seconds at 42° C. The cells are transferred to ice for 2 minutes. 250 microliters of medium (SOC or LB) is added to the cells. The cells are shaked at 200 rpm for 1 hour at 37° C. The cells are then spread on an agar plate comprising 100 micrograms/milliliter ampicillin and stored overnight at 37° C.

[0924] The transformants are analyzed. For example, the transformants are analyzed to determine the identity of the dsOligonucleotide ligated into the vector, and/or confirm the ligation is not a false positive. To analyze transformants, colonies are picked and cultured overnight in LB medium comprising 100 micrograms/milliliter ampicillin at 37° C. The plasmid comprising the site-directed polypeptide and dsOligonucleotide is isolated (e.g., by miniprep kit). A sequencing reaction is performed on the isolated plasmid. The sequencing rection utilizes a sequencing primer that is designed to sequence the dsOligonucleotide (e.g., the sequencing primer is a U6 sequencing primer that binds to the U6 promoter which is located just upstream of the sequence encoding the dsOligonucleotide.

[0925] Once a desired dsOligonucleotide insertion is identified, the plasmid can be stored at −20° C. or in a glycerol stock at −80° C. To make a glycerol stock, the original colony comprising the desired plasmid is streaked on an agar plate comprising 100 micrograms/milliliter ampicillin and incubated overnight at 37° C. A single colony is isolated grown in LB comprising 100 micrograms/milliliter ampicillin until the culture reaches stationary phase. The culture is mixed with glycerol and flash frozen in liquid nitrogen (e.g., 0.85 mL culture is mixed with 0.15 mL glycerol).

[0926] The purified plasmid comprising the desired dsOligonucleotide is inserted into a cell line (e.g., mammalian cell line, HeLa) by transfection. To transfect the plasmid, the plasmid is purified at high concentrations using for example, a maxi prep kit. The plasmid is transfected with lipid-based buffer (e.g., Lipofectamine 2000) into cells which are plated at 70% confluency. 3 micrograms of the vector is transfected into the cells.

### Example 35: Nanoparticle Delivery of an Engineered Nucleic Acid-Targeting Nucleic Acid

[0927] A nanoparticle encapsulating a nucleic acid encoding an engineered nucleic acid-targeting nucleic acid and a site-directed polypeptide will be prepared. Nanoparticles will be prepared by mixing DOPE, Chol, DSPE-PEG and C₁₆mPEG-Ceramide at a molar ratio of 18:60:20:1:1 in 10 mL of 90% ethanol (total lipid 30 μmole). The nucleic acid will be dissolved in 10 mL of 20 mM Tris buffer (pH 7.4-7.6). After being heated to 37° C., the two solutions will be mixed together through a duel syringe pump and the mixed solution will be subsequently diluted with 20 mL of 20 mM Tris buffer (300 mM NaCl, pH 7.4-7.6). The mixture will be incubated at 37° C. for 30 minutes and dialyzed in 10 mM PBS buffer (138 mM NaCl, 2.7 mM KCl, pH 7.4). Stable particles will be obtained after the removal of ethanol from the mixture by dialysis. The nanoparticle solution will be concentrated by centrifugation at 3,000 rpm and a temperature of 4° C. The concentrated suspension will be collected after a given time and will be sterilized by filtration through a 0.22 μm syringe filter (Millex-GV, Millipore, USA). A homogeneous suspension of the nanoparticles comprising the nucleic acid encoding the engineered nucleic acid-targeting nucleic acid and the site-directed polypeptide will be obtained.

[0928] The nanoparticles will be contacted to a cell. The nanoparticle will enter the cell. Inside the cell, the nanoparticle will release the nucleic acid encoding the engineered nucleic acid-targeting nucleic acid and the site-directed polypeptide. The nucleic acid will be transcribed and/or translated to produce an engineered nucleic acid-targeting nucleic acid that binds to a site-directed polypeptide protein, thereby forming a complex. The complex will target a target nucleic acid that hybridizes with the engineered nucleic acid-targeting nucleic acid. The complex will cleave the target nucleic acid.

[0929] In some instances, the nanoparticle will further comprise a nucleic acid encoding a donor polynucleotide. When the target nucleic acid is cleaved by the site-directed polypeptide, the donor polynucleotide will be inserted into the site of the cleaved target nucleic acid.

1-55. (canceled)

56. A method for sequencing a target nucleic acid, the method comprising:
a. contacting a first target site in a nucleic acid with a first complex comprising a first CRISPR Cas9 protein and a first guide RNA and a second target site in the nucleic acid with a second complex comprising a second CRISPR Cas9 protein and a second guide RNA, whereby the first Cas9 protein and the first guide RNA bind and cleave the first target site, and the second Cas9 protein and the second guide RNA bind and cleave the second target site, thereby producing a cleaved target nucleic acid;
b. ligating adapters to the ends of the cleaved target nucleic acid, and
c. sequencing the cleaved target nucleic acid.

57. The method of claim 56, wherein the target nucleic acid is double-stranded, and the first and second target sites occur on the opposite strands of the target nucleic acid, and the first target site comprises in a 5′-3′ direction, a sequence capable of hybridizing to the first guide RNA, and a first protospacer adjacent motif (PAM), and the second target site comprises in a 5′-3′ direction, a second PAM and a sequence capable of hybridizing to the second guide RNA.

58. The method of claim 56, wherein the cleaved target nucleic acid is not bound to the first Cas9 protein and the second Cas9 protein after step a.

59. The method of claim 56, further comprising purifying the cleaved target nucleic acid prior to ligating adapters.

60. The method of claim 56, wherein the first CRISPR Cas9 protein and the second CRISPR Cas9 protein comprise a Streptococcus pyogenes Cas9 protein.

61. The method of claim 56, wherein the target nucleic acid is present in genomic DNA.

62. The method of claim 56, wherein the cleaved target nucleic acid is not bound to the first complex comprising the first CRISPR Cas9 protein and the first guide RNA, or the second complex comprising the second CRISPR Cas9 protein and the second guide RNA.

The application's sequence listing, which the Patent Office published only in electronic form, follows.

SEQUENCE LISTING (1613 sequences)

SEQ ID NO: 1 - protein, 1056 aa, Pasteurella multocida
MQTTNLSYILGLDLGIASVGWAVVEINENEDPIGLIDVGVRIFERAEVPKTGESLALSRRLARSTRRLIRRRAHRLLLAKRFLKREGILSTIDLEKGLPNQAWELRVAGLERRLSAIEWGAVLLHLIKHRGYLSKRKNESQTNNKELGALLSGVAQNHQLLQSDDYRTPAELALKKFAKEEGHIRNQRGAYTHTFNRLDLLAELNLLFAQQHQFGNPHCKEHIQQYMTELLMWQKPALSGEAILKMLGKCTHEKNEFKAAKHTYSAERFVWLTKLNNLRILEDGAERALNEEERQLLINHPYEKSKLTYAQVRKLLGLSEQAIFKHLRYSKENAESATFMELKAWHAIRKALENQGLKDTWQDLAKKPDLLDEIGTAFSLYKTDEDIQQYLTNKVPNSVINALLVSLNFDKFIELSLKSLRKILPLMEQGKRYDQACREIYGHHYGEANQKTSQLLPAIPAQEIRNPVVLRTLSQARKVINAIIRQYGSPARVHIETGRELGKSFKERREIQKQQEDNRTKRESAVQKFKELFSDFSSEPKSKDILKFRLYEQQHGKCLYSGKEINIHRLNEKGYVEIDHALPFSRTWDDSFNNKVLVLASENQNKGNQTPYEWLQGKINSERWKNFVALVLGSQCSAAKKQRLLTQVIDDNKFIDRNLNDTRYIARFLSNYIQENLLLVGKNKKNVFTPNGQITALLRSRWGLIKARENNNRHHALDAIVVACATPSMQQKITRFIRFKEVHPYKIENRYEMVDQESGEIISPHFPEPWAYFRQEVNIRVFDNHPDTVLKEMLPDRPQANHQFVQPLFVSRAPTRKMSGQGHMETIKSAKRLAEGISVLRIPLTQLKPNLLENMVNKEREPALYAGLKARLAEFNQDPAKAFATPFYKQGGQQVKAIRVEQVQKSGVLVRENNGVADNASIVRTDVFIKNNKFFLVPIYTWQVAKGILPNKAIVAHKNEDEWEEMDEGAKFKFSLFPNDLVELKTKKEYFFGYYIGLDRATGNISLKEHDGEISKGKDGVYRVGVKLALSFEKYQVDELGKNRQICRPQQRQPVR

SEQ ID NO: 2 - protein, 1368 aa, Streptococcus pyogenes [sequence omitted]

SEQ ID NO: 3 - protein, 1334 aa, Listeria innocua
MKKPYTIGLDIGTNSVGWAVLTDQYDLVKRKMKIAGDSEKKQIKKNFWGVRLFDEGQTAADRRMARTARRRIERRRNRISYLQGIFAEEMSKTDANFFCRLSDSFYVDNEKRNSRHPFFATIEEEVEYHKNYPTIYHLREELVNSSEKADLRLVYLALAHIIKYRGNFLIEGALDTQNTSVDGIYKQFIQTYNQVFASGIEDGSLKKLEDNKDVAKILVEKVTRKEKLERILKLYPGEKSAGMFAQFISLIVGSKGNFQKPFDLIEKSDIECAKDSYEEDLESLLALIGDEYAELFVAAKNAYSAVVLSSIITVAETETNAKLSASMIERFDTHEEDLGELKAFIKLHLPKHYEEIFSNTEKHGYAGYIDGKTKQADFYKYMKMTLENIEGADYFIAKIEKENFLRKQRTFDNGAIPHQLHLEELEAILHQQAKYYPFLKENYDKIKSLVTFRIPYFVGPLANGQSEFAWLTRKADGEIRPWNIEEKVDFGKSAVDFIEKMTNKDTYLPKENVLPKHSLCYQKYLVYNELTKVRYINDQGKTSYFSGQEKEQIFNDLFKQKRKVKKKDLELFLRNMSHVESPTIEGLEDSFNSSYSTYHDLLKVGIKQEILDNPVNTEMLENIVKILTVFEDKRMIKEQLQQFSDVLDGVVLKKLERRHYTGWGRLSAKLLMGIRDKQSHLTILDYLMNDDGLNRNLMQLINDSNLSFKSIIEKEQVTTADKDIQSIVADLAGSPAIKKGILQSLKIVDELVSVMGYPPQTIVVEMARENQTTGKGKNNSRPRYKSLEKAIKEFGSQILKEHPTDNQELRNNRLYLYYLQNGKDMYTGQDLDIHNLSNYDIDHIVPQSFITDNSIDNLVLTSSAGNREKGDDVPPLEIVRKRKVFWEKLYQGNLMSKRKFDYLTKAERGGLTEADKARFIHRQLVETRQITKNVANILHQRFNYEKDDHGNTMKQVRIVTLKSALVSQFRKQFQLYKVRDVNDYHHAHDAYLNGVVANTLLKVYPQLEPEFVYGDYHQFDWFKANKATAKKQFYTNIMLFFAQKDRIIDENGEILWDKKYLDTVKKVMSYRQMNIVKKTEIQKGEFSKATIKPKGNSSKLIPRKTNWDPMKYGGLDSPNMAYAVVIEYAKGKNKLVFEKKIIRVTIMERKAFEKDEKAFLEEQGYRQPKVLAKLPKYTLYECEEGRRRMLASANEAQKGNQQVLPNHLVTLLHHAANCEVSDGKSLDYIESNREMFAELLAHVSEFAKRYTLAEANLNKINQLFEQNKEGDIKAIAQSFVDLMAFNAMGAPASFKFFETTIERKRYNNLKELLNSTIIYQSITGLYESRKRLDD

SEQ ID NO: 4 - protein, 1368 aa, Streptococcus pyogenes
MDKKYSIGLDIGTNSVGWAVITDDYKVPSKKLKGLGNTDRHGIKKNLIGALLFDSGETAEATRLKRTARRRYTRRKNRICYLQEIFSNEMAKVDDSFFHRLEESFLVEEDKKHERHPIFGNIVDEVAYHEKYPTIYHLRKKLADSTDKVDLRLIYLALAHMIKFRGHFLIEGDLNPDNSDVDKLFIQLVQTYNQLFEENPINASRVDAKAILSARLSKSRRLENLIAQLPGEKKNGLFGNLIALSLGLTPNFKSNFDLAEDAKLQLSKDTYDDDLDNLLAQIGDQYADLFLAAKNLSDATLLSDILRVNSEITKAPLSASMIKRYDEHHQDLTLLKALVRQQLPEKYKEIFFDQSKNGYAGYIDGGASQEEFYKFIKPILEKMDGTEELLAKLNREDLLRKQRTFDNGSIPYQIHLGELHAILRRQEDFYPFLKDNREKIEKILTFRIPYYVGPLARGNSRFAWMTRKSEETITPWNFEEVVDKGASAQSFIERMTNFDKNLPNEKVLPKHSLLYEYFTVYNELTKVKYVTEGMRKPAFLSGEQKKAIVDLLFKTNRKVTVKQLKEDYFKKIECFDSVEISGVEDRFNASLGTYHDLLKIIKDKDFLDNEENEDILEDIVLTLTLFEDREMIEERLKTYAHLFDDKVMKQLKRRRYTGWGRLSRKLINGIRDKQSGKTILDFLKSDGFANRNFMQLIHDDSLTFKEDIQKAQVSGQGDSLHEHIANLAGSPAIKKGILQTVKVVDELVKVMGRHKPENIVIEMARENQTTQKGQKNSRERMKRIEEGIKELGSDILKEYPVENTQLQNEKLYLYYLQNGRDMYVDQELDINRLSDYDVDHIVPQSFLKDDSIDNKVLTRSDKNRGKSDNVPSEEVVKKMKNYWRQLLNAKLITQRKFDNLTKAERGGLSELDKVGFIKRQLVETRQITKHVAQILDSRMNTKYDENDKLIREVRVITLKSKLVSDFRKDFQFYKVREINNYHHAHDAYLNAVVGTALIKKYPKLESEFVYGDYKVYDVRKMIAKSEQEIGKATAKYFFYSNIMNFFKTEITLANGEIRKRPLIETNGETGEIVWDKGRDFATVRKVLSMPQVNIVKKTEVQTGGFSKESILPKRNSDKLIARKKDWDPKKYGGFDSPTVAYSVLVVAKVEKGKSKKLKSVKELLGITIMERSSFEKDPIDFLEAKGYKEVRKDLIIKLPKYSLFELENGRKRMLASAGELQKGNELALPSKYVNFLYLASHYEKLKGSPEDNEQKQLFVEQHKHYLDEIIEQISEFSKRVILADANLDKVLSAYNKHRDKPIREQAENIIHLFTLTNLGAPAAFKYFDTTIDRKRYTSTKEVLDATLIHQSITGLYETRIDLSQLGGD

SEQ ID NO: 5 - protein, 1370 aa, Streptococcus agalactiae
MNKPYSIGLDIGTNSVGWSIITDDYKVPAKKMRVLGNTDKEYIKKNLIGALLFDGGNTAADRRLKRTARRRYTRRRNRILYLQEIFAEEMSKVDDSFFHRLEDSFLVEEDKRGSKYPIFATLQEEKDYHEKFSTIYHLRKELADKKEKADLRLIYIALAHIIKFRGHFLIEDDSFDVRNTDISKQYQDFLEIFNTTFENNDLLSQNVDVEAILTDKISKSAKKDRILAQYPNQKSTGIFAEFLKLIVGNQADFKKYFNLEDKTPLQFAKDSYDEDLENLLGQIGDEFADLFSAAKKLYDSVLLSGILTVIDLSTKAPLSASMIQRYDEHREDLKQLKQFVKASLPEKYQEIFADSSKDGYAGYIEGKTNQEAFYKYLSKLLTKQEDSENFLEKIKNEDFLRKQRTFDNGSIPHQVHLTELKAIIRRQSEYYPFLKENQDRIEKILTFRIPYYIGPLAREKSDFAWMTRKTDDSIRPWNFEDLVDKEKSAEAFIHRMTNNDFYLPEEKVLPKHSLIYEKFTVYNELTKVRYKNEQGETYFFDSNIKQEIFDGVFKEHRKVSKKKLLDFLAKEYEEFRIVDVIGLDKENKAFNASLGTYHDLEKILDKDFLDNPDNESILEDIVQTLTLFEDREMIKKRLENYKDLFTESQLKKLYRRHYTGWGRLSAKLINGIRDKESQKTILDYLIDDGRSNRNFMQLINDDGLSFKSIISKAQAGSHSDNLKEVVGELAGSPAIKKGILQSLKIVDELVKVMGYEPEQIVVEMARENQTTNQGRRNSRQRYKLLDDGVKNLASDLNGNILKEYPTDNQALQNERLFLYYLQNGRDMYTGEALDIDNLSQYDIDHIIPQAFIKDDSIDNRVLVSSAKNRGKSDDVPSLEIVKDCKVFWKKLLDAKLMSQRKYDNLTKAERGGLTSDDKARFIQRQLVETRQITKHVARILDERFNNELDSKGRRIRKVKIVTLKSNLVSNFRKEFGFYKIREVNNYHHAHDAYLNAVVAKAILTKYPQLEPEFVYGDYPKYNSYKTRKSATEKLFFYSNIMNFFKTKVTLADGTVVVKDDIEVNNDTGEIVWDKKKHFATVRKVLSYPQNNIVKKTEIQTGGFSKESILAHGNSDKLIPRKTKDIYLDPKKYGGFDSPIVAYSVLVVADIKKGKAQKLKTVTELLGITIMERSRFEKNPSAFLESKGYLNIRADKLIILPKYSLFELENGRRRLLASAGELQKGNELALPTQFMKFLYLASRYNESKGKPEEIEKKQEFVNQHVSYFDDILQLINDFSKRVILADANLEKINKLYQDNKENISVDELANNIINLFTFTSLGAPAAFKFFDKIVDRKRYTSTKEVLNSTLIHQSITGLYETRIDLGKLGED

SEQ ID NO: 6 - protein, 1345 aa, Streptococcus mutans
MKKPYSIGLDIGTNSVGWAVVTDDYKVPAKKMKVLGNTDKSHIEKNLLGALLFDSGNTAEDRRLKRTARRRYTRRRNRILYLQEIFSEEMGKVDDSFFHRLEDSFLVTEDKRGERHPIFGNLEEEVKYHENFPTIYHLRQYLADNPEKVDLRLVYLALAHIIKFRGHFLIEGKFDTRNNDVQRLFQEFLAVYDNTFENSSLQEQNVQVEEILTDKISKSAKKDRVLKLFPNEKSNGRFAEFLKLIVGNQADFKKHFELEEKAPLQFSKDTYEEELEVLLAQIGDNYAELFLSAKKLYDSILLSGILTVTDVGTKAPLSASMIQRYNEHQMDLAQLKQFIRQKLSDKYNEVFSDVSKDGYAGYIDGKTNQEAFYKYLKGLLNKIEGSGYFLDKIEREDFLRKQRTFDNGSIPHQIHLQEMRAIIRRQAEFYPFLADNQDRIEKLLTFRIPYYVGPLARGKSDFAWLSRKSADKITPWNFDEIVDKESSAEAFINRMTNYDLYLPNQKVLPKHSLLYEKFTVYNELTKVKYKTEQGKTAFFDANMKQEIFDGVFKVYRKVTKDKLMDFLEKEFDEFRIVDLTGLDKENKVFNASYGTYHDLCKILDKDFLDNSKNEKILEDIVLTLTLFEDREMIRKRLENYSDLLTKEQVKKLERRHYTGWGRLSAELIHGIRNKESRKTILDYLIDDGNSNRNFMQLINDDALSFKEEIAKAQVIGETDNLNQVVSDIAGSPAIKKGILQSLKIVDELVKIMGHQPENIVVEMARENQFTNQGRRNSQQRLKGLTDSIKEFGSQILKEHPVENSQLQNDRLFLYYLQNGRDMYTGEELDIDYLSQYDIDHIIPQAFIKDNSIDNRVLTSSKENRGKSDDVPSKDVVRKMKSYWSKLLSAKLITQRKFDNLTKAERGGLTDDDKAGFIKRQLVETRQITKHVARILDERFNTETDENNKKIRQVKIVTLKSNLVSNFRKEFELYKVREINDYHHAHDAYLNAVIGKALLGVYPQLEPEFVYGDYPHFHGHKENKATAKKFFYSNIMNFFKKDDVRTDKNGEIIWKKDEHISNIKKVLSYPQVNIVKKVEEQTGGFSKESILPKGNSDKLIPRKTKKFYWDTKKYGGFDSPIVAYSILVIADIEKGKSKKLKTVKALVGVTIMEKMTFERDPVAFLERKGYRNVQEENIIKLPKYSLFKLENGRKRLLASARELQKGNEIVLPNHLGTLLYHAKNIHKVDEPKHLDYVDKHKDEFKELLDVVSNFSKKYTLAEGNLEKIKELYAQNNGEDLKELASSFINLLTFTAIGAPATFKFFDKNIDRKRYTSTTEILNATLIHQSITGLYETRIDLNKLGGD

SEQ ID NO: 7 - protein, 1377 aa, Streptococcus agalactiae
MNKPYSIGLDIGTNSVGWSIITDDYKVPAKKMRVLGNTDKEYIKKNLIGALLFDGGNTAADRRLKRTARRRYTRRRNRILYLQEIFAEEMSKVDDSFFHRLEDSFLVEEDKRGSKYPIFATMQEEKYYHEKFPTIYHLRKELADKKEKADLRLVYLALAHIIKFRGHFLIEDDRFDVRNTDIQKQYQAFLEIFDTTFENNHLLSQNVDVEAILTDKISKSAKKDRILAQYPNQKSTGIFAEFLKLIVGNQADFKKHFNLEDKTPLQFAKDSYDEDLENLLGQIGDEFADLFSVAKKLYDSVLLSGILTVTDLSTKAPLSASMIQRYDEHHEDLKHLKQFVKASLPENYREVFADSSKDGYAGYIEGKTNQEAFYKYLLKLLTKQEGSEYFLEKIKNEDFLRKQRTFDNGSIPHQVHLTELRAIIRRQSEYYPFLKENQDRIEKILTFRIPYYVGPLAREKSDFAWMTRKTDDSIRPWNFEDLVDKEKSAEAFIHRMTNNDLYLPEEKVLPKHSLIYEKFTVYNELTKVRFLAEGFKDFQFLNRKQKETIFNSLFKEKRKVTEKDIISFLNKVDGYEGIAIKGIEKQFNASLSTYHDLKKILGKDFLDNTDNELILEDIVQTLTLFEDREMIKKCLDIYKDFFTESQLKKLYRRHYTGWGRLSAKLINGIRNKENQKTILDYLIDDGSANRNFMQLINDDDLSFKPIIDKARTGSHSDNLKEVVGELAGSPAIKKGILQSLKIVDELVKVMGYEPEQIVVEMARENQTTAKGLSRSRQRLTTLRESLANLKSNILEEKKPKYVKDQVENHHLSDDRLFLYYLQNGRDMYTKKALDIDNLSQYDIDHIIPQAFIKDDSIDNRVLVSSAKNRGKSDDVPSIEIVKARKMFWKNLLDAKLMSQRKYDNLTKAERGGLTSDDKARFIQRQLVETRQITKHVARILDERFNNEVDNGKKICKVKIVTLKSNLVSNFRKEFGFYKIREVNDYHHAHDAYLNAVVAKAILTKYPQLEPEFVYGMYRQKKLSKIVHEDKEEKYSEATRKMFFYSNLMNMFKRVVRLADGSIVVRPVIETGRYMRKTAWDKKKHFATVRKVLSYPQNNIVKKTEIQTGGFSKESILAHGNSDKLIPRKTKDIYLDPKKYGGFDSPIVAYSVLVVADIKKGKAQKLKTVTELLGITIMERSRFEKNPSAFLESKGYLNIRDDKLMILPKYSLFELENGRRRLLASAGELQKGNELALPTQFMKFLYLASRYNESKGKPEEIEKKQEFVNQHVSYFDDILQLINDFSKRVILADANLEKINKLYQDNKENIPVDELANNIINLFTFTSLGAPAAFKFFDKIVDRKRYTSTKEVLNSTLIHQSITGLYETRIDLGKLGED

SEQ ID NO: 8 - protein, 1368 aa, Streptococcus pyogenes; identical to SEQ ID NO: 4

SEQ ID NO: 9 - protein, 131 aa, Helicobacter hepaticus
MRILGFDIGITSIGWAYVESNELKDCGVRIFTKAENPKNGDSLAAPRREARGARRRLARRKARLNAIKRLLCKEFELNLNDYLANDGELPKAYQTSKDTKSPYELYTAFHWIIFAFCSIASSLSNRQMLPI

SEQ ID NO: 10 - protein, 1059 aa, Wolinella succinogenes
MIERILGVDLGISSLGWAIVEYDKDDEAANRIIDCGVRLFTAAETPKKKESPNKARREARGIRRVLNRRRVRMNMIKKLFLRAGLIQDVDLDGEGGMFYSKANRADVWELRHDGLYRLLKGDELARVLIHIAKHRGYKFIGDDEADEESGKVKKAGVVLRQNFEAAGCRTVGEWLWRERGANGKKRNKHGDYEISIHRDLLVEEVEAIFVAQQEMRSTIATDALKAAYREIAFFVRPMQRIEKMVGHCTYFPEERRAPKSAPTAEKFIAISKFFSTVIIDNEGWEQKIIERKTLEELLDFAVSREKVEFRHLRKFLDLSDNEIFKGLHYKGKPKTAKKREATLFDPNEPTELEFDKVEAEKKAWISLRGAAKLREALGNEFYGRFVALGKHADEATKILTYYKDEGQKRRELTKLPLEAEMVERLVKIGFSDFLKLSLKAIRDILPAMESGARYDEAVLMLGVPHKEKSAILPPLNKTDIDILNPTVIRAFAQFRKVANALVRKYGAFDRVHFELAREINTKGEIEDIKESQRKNEKERKEAADWIAETSFQVPLTRKNILKKRLYIQQDGRCAYTGDVIELERLFDEGYCEIDHILPRSRSADDSFANKVLCLARANQQKTDRTPYEWFGHDAARWNAFETRTSAPSNRVRTGKGKIDRLLKKNFDENSEMAFKDRNLNDTRYMARAIKTYCEQYWVFKNSHTKAPVQVRSGKLTSVLRYQWGLESKDRESHTHHAVDAIIIAFSTQGMVQKLSEYYRFKETHREKERPKLAVPLANFRDAVEEATRIENTETVKEGVEVKRLLISRPPRARVTGQAHEQTAKPYPRIKQVKNKKKWRLAPIDEEKFESFKADRVASANQKNFYETSTIPRVDVYHKKGKFHLVPIYLHEMVLNELPNLSLGTNPEAMDENFFKFSIFKDDLISIQTQGTPKKPAKIIMGYFKNMHGANMVLSSINNSPCEGFTCTPVSMDKKHKDKCKLCPEENRIAGRCLQGFLDYWSQEGLRPPRKEFECDQGVKFALDVKKYQIDPLGYYYEVKQEKRLGTIPQMRSAKKLVKK

SEQ ID NO: 11 - protein, 1409 aa, Wolinella succinogenes
MLVSPISVDLGGKNTGFFSFTDSLDNSQSGTVIYDESFVLSQVGRRSKRHSKRNNLRNKLVKRLFLLILQEHHGLSIDVLPDEIRGLFNKRGYTYAGFELDEKKKDALESDTLKEFLSEKLQSIDRDSDVEDFLNQIASNAESFKDYKKGFEAVFASATHSPNKKLELKDELKSEYGENAKELLAGLRVTKEILDEFDKQENQGNLPRAKYFEELGEYIATNEKVKSFFDSNSLKLTDMTKLIGNISNYQLKELRRYFNDKEMEKGDIWIPNKLHKITERFVRSWHPKNDADRQRRAELMKDLKSKEIMELLTTTEPVMTIPPYDDMNNRGAVKCQTLRLNEEYLDKHLPNWRDIAKRLNHGKFNDDLADSTVKGYSEDSTLLHRLLDTSKEIDIYELRGKKPNELLVKTLGQSDANRLYGFAQNYYELIRQKVRAGIWVPVKNKDDSLNLEDNSNMLKRCNHNPPHKKNQIHNLVAGILGVKLDEAKFAEFEKELWSAKVGNKKLSAYCKNIEELRKTHGNTFKIDIEELRKKDPAELSKEEKAKLRLTDDVILNEWSQKIANFFDIDDKHRQRFNNLFSMAQLHTVIDTPRSGFSSTCKRCTAENRFRSETAFYNDETGEFHKKATATCQRLPADTQRPFSGKIERYIDKLGYELAKIKAKELEGMEAKEIKVPIILEQNAFEYEESLRKSKTGSNDRVINSKKDRDGKKLAKAKENAEDRLKDKDKRIKAFSSGICPYCGDTIGDDGEIDHILPRSHTLKIYGTVFNPEGNLIYVHQKCNQAKADSIYKLSDIKAGVSAQWIEEQVANIKGYKTFSVLSAEQQKAFRYALFLQNDNEAYKKVVDWLRTDQSARVNGTQKYLAKKIQEKLTKMLPNKHLSFEFILADATEVSELRRQYARQNPLLAKAEKQAPSSHAIDAVMAFVARYQKVFKDGTPPNADEVAKLAMLDSWNPASNEPLTKGLSTNQKIEKMIKSGDYGQKNMREVFGKSIFGENAIGERYKPIVVQEGGYYIGYPATVKKGYELKNCKVVTSKNDIAKLEKIIKNQDLISLKENQYIKIFSINKQTISELSNRYFNMNYKNLVERDKEIVGLLEFIVENCRYYTKKVDVKFAPKYIHETKYPFYDDWRRFDEAWRYLQENQNKTSSKDRFVIDKSSLNEYYQPDKNEYKLDVDTQPIWDDFCRWYFLDRYKTANDKKSIRIKARKTFSLLAESGVQGKVFRAKRKIPTGYAYQALPMDNNVIAGDYANILLEANSKTLSLVPKSGISIEKQLDKKLDVIKKTDVRGLAIDNNSFFNADFDTHGIRLIVENTSVKVGNFPISAIDKSAKRMIFRALFEKEKGKRKKKTTISFKESGPVQDYLKVFLKKIVKIQLRTDGSISNIVVRKNAADFTLSFRSEHIQKLLK

SEQ ID NO: 12 - protein, 1374 aa, Fusobacterium nucleatum
MKKQKFSDYYLGFDIGTNSVGWCVTDLDYNVLRFNKKDMWGSRLFDEAKTAAERRVQRNSRRRLKRRKWRLNLLEEIFSDEIMKIDSNFFRRLKESSLWLEDKNSKEKFTLFNDDNYKDYDFYKQYPTIFHLRDELIKNPEKKDIRLIYLALHSIFKSRGHFLFEGQNLKEIKNFETLYNNLISFLEDNGINKSIDKDNIEKLEKIICDSGKGLKDKEKEFKGIFNSDKQLVAIFKLSVGSSVSLNDLFDTDEYKKEEVEKEKISFREQIYEDDKPIYYSILGEKIELLDIAKSFYDFMVLNNILSDSNYISEAKVKLYEEHKKDLKNLKYIIRKYNKENYDKLFKDKNENNYPAYIGLNKEKDKKEVVEKSRLKIDDLIKVIKGYLPKPERIEEKDKTIFNEILNKIELKTILPKQRISDNGTLPYQIHEVELEKILENQSKYYDFLNYEENGVSTKDKLLKTFKFRIPYYVGPLNSYHKDKGGNSWIVRKEEGKILPWNFEQKVDIEKSAEEFIKRMTNKCTYLNGEDVIPKDSFLYSEYIILNELNKVQVNDEFLNEENKRKIIDELFKENKKVSEKKFKEYLLVNQIANRTVELKGIKDSFNSNYVSYIKFKDIFGEKLNLDIYKEISEKSILWKCLYGDDKKIFEKKIKNEYGDILNKDEIKKINSFKFNTWGRLSEKLLTGIEFINLETGECYSSVMEALRRTNYNLMELLSSKFTLQESIDNENKEMNEVSYRDLIEESYVSPSLKRAILQTLKIYEEIKKITGRVPKKVFIEMARGGDESMKNKKIPARQEQLKKLYDSCGNDIANFSIDIKEMKNSLSSYDNNSLRQKKLYLYYLQFGKCMYTGREIDLDRLLQNNDTYDIDHIYPRSKVIKDDSFDNLVLVLKNENAEKSNEYPVKKEIQEKMKSFWRFLKEKNFISDEKYKRLTGKDDFELRGFMARQLVNVRQTTKEVGKILQQIEPEIKIVYSKAEIASSFREMFDFIKVRELNDTHHAKDAYLNIVAGNVYNTKFTEKPYRYLQEIKENYDVKKIYNYDIKNAWDKENSLEIVKKNMEKNTVNITRFIKEEKGELFNLNPIKKGETSNEIISIKPKLYDGKDNKLNEKYGYYTSLKAAYFIYVEHEKKNKKVKTFERITRIDSTLIKNEKNLIKYLVSQKKLLNPKIIKKIYKEQTLIIDSYPYTFTGVDSNKKVELKNKKQLYLEKKYEQILKNALKFVEDNQGETEENYKFIYLKKRNNNEKNETIDAVKERYNIEFNEMYDKFLEKLSSKDYKNYINNKLYTNFLNSKEKFKKLKLWEKSLILREFLKIFNKNTYGKYEIKDSQTKEKLFSFPEDTGRIRLGQSSLGNNKELLEESVTGLFVKKIKL

SEQ ID NO: 13 - protein, 1084 aa, Corynebacterium diphtheriae
MKYHVGIDVGTFSVGLAAIEVDDAGMPIKTLSLVSHIHDSGLDPDEIKSAVTRLASSGIARRTRRLYRRKRRRLQQLDKFIQRQGWPVIELEDYSDPLYPWKVRAELAASYIADEKERGEKLSVALRHIARHRGWRNPYAKVSSLYLPDGPSDAFKAIREEIKRASGQPVPETATVGQMVTLCELGTLKLRGEGGVLSARLQQSDYAREIQEICRMQEIGQELYRKIIDVVFAAESPKGSASSRVGKDPLQPGKNRALKASDAFQRYRIAALIGNLRVRVDGEKRILSVEEKNLVFDHLVNLTPKKEPEWVTIAEILGIDRGQLIGTATMTDDGERAGARPPTHDTNRSIVNSRIAPLVDWWKTASALEQHAMVKALSNAEVDDFDSPEGAKVQAFFADLDDDVHAKLDSLHLPVGRAAYSEDTLVRLTRRMLSDGVDLYTARLQEFGIEPSWTPPTPRIGEPVGNPAVDRVLKTVSRWLESATKTWGAPERVIIEHVREGFVTEKRAREMDGDMRRRAARNAKLFQEMQEKLNVQGKPSRADLWRYQSVQRQNCQCAYCGSPITFSNSEMDHIVPRAGQGSTNTRENLVAVCHRCNQSKGNTPFAIWAKNTSIEGVSVKEAVERTRHWVTDTGMRSTDFKKFTKAVVERFQRATMDEEIDARSMESVAWMANELRSRVAQHFASHGTTVRVYRGSLTAEARRASGISGKLKFFDGVGKSRLDRRHHAIDAAVIAFTSDYVAETLAVRSNLKQSQAHRQEAPQWREFTGKDAEHRAAWRVWCQKMEKLSALLTEDLRDDRVVVMSNVRLRLGNGSAHKETIGKLSKVKLSSQLSVSDIDKASSEALWCALTREPGFDPKEGLPANPERHIRVNGTHVYAGDNIGLFPVSAGSIALRGGYAELGSSFHHARVYKITSGKKPAFAMLRVYTIDLLPYRNQDLFSVELKPQTMSMRQAEKKLRDALATGNAEYLGWLVVDDELVVDTSKIATDQVKAVEAELGTIRRWRVDGFFSPSKLRLRPLQMSKEGIKKESAPELSKIIDRPGWLPAVNKLFSDGNVTVVRRDSLGRVRLESTAHLPVTWKVQ

SEQ ID NO: 14 - protein, 1395 aa, Treponema denticola
MKKEIKDYFLGLDVGTGSVGWAVTDTDYKLLKANRKDLWGMRCFETAETAEVRRLHRGARRRIERRKKRIKLLQELFSQEIAKTDEGFFQRMKESPFYAEDKTILQENTLFNDKDFADKTYHKAYPTINHLIKAWIENKVKPDPRLLYLACHNIIKKRGHFLFEGDFDSENQFDTSIQALFEYLREDMEVDIDADSQKVKEILKDSSLKNSEKQSRLNKILGLKPSDKQKKAITNLISGNKINFADLYDNPDLKDAEKNSISFSKDDFDALSDDLASILGDSFELLLKAKAVYNCSVLSKVIGDEQYLSFAKVKIYEKHKTDLTKLKNVIKKHFPKDYKKVFGYNKNEKNNNNYSGYVGVCKTKSKKLIINNSVNQEDFYKFLKTILSAKSEIKEVNDILTEIETGTFLPKQISKSNAEIPYQLRKMELEKILSNAEKHFSFLKQKDEKGLSHSEKIIMLLTFKIPYYIGPINDNHKKFFPDRCWVVKKEKSPSGKTTPWNFFDHIDKEKTAEAFITSRTNFCTYLVGESVLPKSSLLYSEYTVLNEINNLQIIIDGKNICDIKLKQKIYEDLFKKYKKITQKQISTFIKHEGICNKTDEVIILGIDKECTSSLKSYIELKNIFGKQVDEISTKNMLEEIIRWATIYDEGEGKTILKTKIKAEYGKYCSDEQIKKILNLKFSGWGRLSRKFLETVTSEMPGFSEPVNIITAMRETQNNLMELLSSEFTFTENIKKINSGFEDAEKQFSYDGLVKPLFLSPSVKKMLWQTLKLVKEISHITQAPPKKIFIEMAKGAELEPARTKTRLKILQDLYNNCKNDADAFSSEIKDLSGKIENEDNLRLRSDKLYLYYTQLGKCMYCGKPIEIGHVFDTSNYDIDHIYPQSKIKDDSISNRVLVCSSCNKNKEDKYPLKSEIQSKQRGFWNFLQRNNFISLEKLNRLTRATPISDDETAKFIARQLVETRQATKVAAKVLEKMFPETKIVYSKAETVSMFRNKFDIVKCREINDFHHAHDAYLNIVVGNVYNTKFTNNPWNFIKEKRDNPKIADTYNYYKVFDYDVKRNNITAWEKGKTIITVKDMLKRNTPIYTRQAACKKGELFNQTIMKKGLGQHPLKKEGPFSNISKYGGYNKVSAAYYTLIEYEEKGNKIRSLETIPLYLVKDIQKDQDVLKSYLTDLLGKKEFKILVPKIKINSLLKINGFPCHITGKTNDSFLLRPAVQFCCSNNEVLYFKKIIRFSEIRSQREKIGKTISPYEDLSFRSYIKENLWKKTKNDEIGEKEFYDLLQKKNLEIYDMLLTKHKDTIYKKRPNSATIDILVKGKEKFKSLIIENQFEVILEILKLFSATRNVSDLQHIGGSKYSGVAKIGNKISSLDNCILIYQSITGIFEKRIDLLKV

SEQ ID NO: 15 - protein, 1334 aa, Listeria monocytogenes
MKNPYTIGLDIGTNSVGWAVLTNQYDLVKRKMKVAGNSDKKQIKKNFWGVRLFDDGQTAVDRRMNRTARRRIERRRNRISYLQEIFAVEMANIDANFFCRLNDSFYVDSEKRNSRHPFFATIEEEVAYHDNYRTIYHLREKLVNSSEKADLRLVYLALAHIIKYRGNFLIEGALDTKNTSVDEVYKQFIETYNQVFMSNIEEGALAKVEENIEVANILAGKFTRREKFERILQLYPGEKSTGMFAQFISLIVGSKGNFQKVFDLIEKTDIECAKDSYEEDLETLLAIIGDEYAELFVAAKNTYNAVVLSSIITVTDTETNAKLSASMIERFDAHEKDLVELKAFIKLNLPKQYEEIFSNAAIDGYAGYIDGKTKQVDFYKYLKTILENIEGSDYFIAKIEEENFLRKQRTFDNGAIPHQLHLEELEAIIHQQAKYYPFLKEDYDKIKSLVTFRIPYFVGPLANGQSEFAWLTRKADGEIRPWNIEEKVDFGKSAVDFIEKMTNKDTYLPKENVLPKHSLCYQKYMVYNELTKIRYIDDQGKTNYFSGREKQQVFNDLFKQKRKVKKKDLELFLRNINHIESPTIEGLEDSFNASYATYHDLLKVGMKQEILDNPLNTEMLEDIVKILTVFEDKPMIKEQLQQFSDVLDGGVLKKLERRHYTGWGRLSAKLLVGIREKQSHLTILDYLMNDDGLNRNLMQLINDSNLSFKSIIEKEQVSTTDKDLQSIVAELAGSPAIKKGILQSLKIVDELVSIMGYPPQTIVVEMARENQTTGKGKNNSKPRYKSLEKAIKEFGSQILKEHPTDNQELKNNRLYLYYLQNGKDMYTGQELDIHNLSNYDIDHIVPQSFITDNSIDNLVLTSSAGNREKGGDVPPLEIVRKRKVFWEKLYQGNLMSKRKFDYLTKAERGGLTEADKARFIHRQLVETRQITKNVANILYQRFNKETDNHGNTMEQVRIVTLKSALVSQFRKQFQLYKVREVNGYHHAHDAYLNGVVANTLLKVYPQLEPEFVYGEYHQFDWFKANKATAKKQFYTNIMLFFAQKERIIDENGEILWDKKYLETIKKVLDYRQMNIVKKTEIQKGEFSKATIKPKGNSSKLIPRKENWDPMKYGGLDSPNMAYAVIIEHAKGKKKIVIEKKLIQINIMERKMFEKDEEAFLEEKGYRHPKVLTKLPKYTLYECEKGRRRMLASANEAQKGNQLVLSNHLVSLLYHAKNCEASDGKSLKYIEAHRETFSELLAQVSEFATRYTLADANLSKINNLFEQNKEGDIKAIAQSFVDLMAFNAMGAPASFKFFEATIDRKRYTNLKELLSSTIIYQSITGLYESRKRLDD

SEQ ID NO: 16 - protein, 1236 aa, Mycoplasma mobile
MYFYKNKENKLNKKVVLGLDLGIASVGWCLTDISQKEDNKFPIILHGVRLFETVDDSDDKLLNETRRKKRGQRRRNRRLFTRKRDFIKYLIDNNIIELEFDKNPKILVRNFIEKYINPFSKNLELKYKSVTNLPIGFHNLRKAAINEKYKLDKSELIVLLYFYLSLRGAFFDNPEDTKSKEMNKNEIEIFDKNESIKNAEFPIDKIIEFYKISGKIRSTINLKFGHQDYLKEIKQVFEKQNIDFMNYEKFAMEEKSFFSRIRNYSEGPGNEKSFSKYGLYANENGNPELIINEKGQKIYTKIFKTLWESKIGKCSYDKKLYRAPKNSFSAKVFDITNKLTDWKHKNEYISERLKRKILLSRFLNKDSKSAVEKILKEENIKFENLSEIAYNKDDNKINLPIINAYHSLTTIFKKHLINFENYLISNENDLSKLMSFYKQQSEKLFVPNEKGSYEINQNNNVLHIFDAISNILNKFSTIQDRIRILEGYFEFSNLKKDVKSSEIYSEIAKLREFSGTSSLSFGAYYKFIPNLISEGSKNYSTISYEEKALQNQKNNFSHSNLFEKTWVEDLIASPTVKRSLRQTMNLLKEIFKYSEKNNLEIEKIVVEVTRSSNNKHERKKIEGINKYRKEKYEELKKVYDLPNENTTLLKKLWLLRQQQGYDAYSLRKIEANDVINKPWNYDIDHIVPRSISFDDSFSNLVIVNKLDNAKKSNDLSAKQFIEKIYGIEKLKEAKENWGNWYLRNANGKAFNDKGKFIKLYTIDNLDEFDNSDFINRNLSDTSYITNALVNHLTFSNSKYKYSVVSVNGKQTSNLRNQIAFVGIKNNKETEREWKRPEGFKSINSNDFLIREEGKNDVKDDVLIKDRSFNGHHAEDAYFITIISQYFRSFKRIERLNVNYRKETRELDDLEKNNIKFKEKASFDNFLLINALDELNEKLNQMRFSRMVITKKNTQLFNETLYSGKYDKGKNTIKKVEKLNLLDNRTDKIKKIEEFFDEDKLKENELTKLHIFNHDKNLYETLKIIWNEVKIEIKNKNLNEKNYFKYFVNKKLQEGKISFNEWVPILDNDFKIIRKIRYIKFSSEEKETDEIIFSQSNFLKIDQRQNFSFHNTLYWVQIWVYKNQKDQYCFISIDARNSKFEKDEIKINYEKLKTQKEKLQIINEEPILKINKGDLFENEEKELFYIVGRDEKPQKLEIKYILGKKIKDQKQIQKPVKKYFPNWKKVNLTYMGEIFKK

SEQ ID NO: 17 - protein, 1372 aa, Legionella pneumophila
MESSQILSPIGIDLGGKFTGVCLSHLEAFAELPNHANTKYSVILIDHNNFQLSQAQRRATRHRVRNKKRNQFVKRVALQLFQHILSRDLNAKEETALCHYLNNRGYTYVDTDLDEYIKDETTINLLKELLPSESEHNFIDWFLQKMQSSEFRKILVSKVEEKKDDKELKNAVKNIKNFITGFEKNSVEGHRHRKVYFENIKSDITKDNQLDSIKKKIPSVCLSNLLGHLSNLQWKNLHRYLAKNPKQFDEQTFGNEFLRMLKNFRHLKGSQESLAVRNLIQQLEQSQDYISILEKTPPEITIPPYEARTNTGMEKDQSLLLNPEKLNNLYPNWRNLIPGIIDAHPFLEKDLEHTKLRDRKRIISPSKQDEKRDSYILQRYLDLNKKIDKFKIKKQLSFLGQGKQLPANLIETQKEMETHFNSSLVSVLIQIASAYNKEREDAAQGIWFDNAFSLCELSNINPPRKQKILPLLVGAILSEDFINNKDKWAKFKIFWNTHKIGRTSLKSKCKEIEEARKNSGNAFKIDYEEALNHPEHSNNKALIKIIQTIPDIIQAIQSHLGHNDSQALIYHNPFSLSQLYTILETKRDGFHKNCVAVTCENYWRSQKTEIDPEISYASRLPADSVRPFDGVLARMMQRLAYEIAMAKWEQIKHIPDNSSLLIPIYLEQNRFEFEESFKKIKGSSSDKTLEQAIEKQNIQWEEKFQRIINASMNICPYKGASIGGQGEIDHIYPRSLSKKHFGVIFNSEVNLIYCSSQGNREKKEEHYLLEHLSPLYLKHQFGTDNVSDIKNFISQNVANIKKYISFHLLTPEQQKAARHALFLDYDDEAFKTITKFLMSQQKARVNGTQKFLGKQIMEFLSTLADSKQLQLEFSIKQITAEEVHDHRELLSKQEPKLVKSRQQSFPSHAIDATLTMSIGLKEFPQFSQELDNSWFINHLMPDEVHLNPVRSKEKYNKPNISSTPLFKDSLYAERFIPVWVKGETFAIGFSEKDLFEIKPSNKEKLFTLLKTYSTKNPGESLQELQAKSKAKWLYFPINKTLALEFLHHYFHKEIVTPDDTTVCHFINSLRYYTKKESITVKILKEPMPVLSVKFESSKKNVLGSFKHTIALPATKDWERLFNHPNFLALKANPAPNPKEFNEFIRKYFLSDNNPNSDIPNNGHNIKPQKHKAVRKVFSLPVIPGNAGTMMRIRRKDNKGQPLYQLQTIDDTPSMGIQINEDRLVKQEVLMDAYKTRNLSTIDGINNSEGQAYATFDNWLTLPVSTFKPEIIKLEMKPHSKTRRYIRITQSLADFIKTIDEALMIKPSDSIDDPLNMPNEIVCKNKLFGNELKPRDGKMKIVSTGKIVTYEFESDSTPQWIQTLYVTQLKKQP

SEQ ID NO: 18 - protein, 1122 aa, Streptococcus thermophilus
MSDLVLGLDIGIGSVGVGILNKVTGEIIHKNSRIFPAAQAENNLVRRTNRQGRRLTRRKKHRIVRLNRLFEESGLITDFTKISINLNPYQLRVKGLTDELSNEELFIALKNMVKHRGISYLDDASDDGNSSVGDYAQIVKENSKQLETKTPGQIQLERYQTYGQLRGDFTVEKDGKKHRLINVFPTSAYRSEALRILQTQQEFNSQITDEFINRYLEILTGKRKYYHGPGNEKSRTDYGRYRTNGETLDNIFGILIGKCTFYPDEFRAAKASYTAQEFNLLNDLNNLTVPTETKKLSKEQKNQIINYVKNEKVMGPAKLFKYIAKLLSCDVADIKGHRIDKSGKAEIHTFEAYRKMKTLETLDIEQMDRETLDKLAYVLTLNTEREGIQEALEHEFADGSFSQKQVDELVQFRKANSSIFGKGWHNFSVKLMMELIPELYETSEEQMTILTRLGKQKTTSSSNKTKYIDEKLLTEEIYNPVVAKSVRQAIKIVNAAIKEYGDFDNIVIEMARETNEDDEKKAIQKIQKANKDEKDAAMLKAANQYNGKAELPHSVFHGHKQLATKIRLWHQQGERCLYTGKTISIHDLINNPNQFEVDHILPLSITFDDSLANKVLVYATANQEKGQRTPYQALDSMDDAWSFRELKAFVRESKTLSNKKKEYLLTEEDISKFDVRKKFIERNLVDTRYASRVVLNALQEHFRAHKIDTKVSVVRGQFTSQLRRHWGIEKTRDTYHHHAVDALIIAASSQLNLWKKQKNTLVSYSEEQLLDIETGELISDDEYKESVFKAPYQHFVDTLKSKEFEDSILFSYQVDSKFNRKISDATIYATRQAKVGKDKKDETYVLGKIKDIYTQDGYDAFMKIYKKDKSKFLMYRHDPQTFEKVIEPILENYPNKEMNEKGKEVPCNPFLKYKEEHGYIRKYSKKGNGPEIKSLKYYDSKLLGNPIDITPENSKNKVVLQSLKPWRTDVYFNKNTGKYEILGLKYADLQFEKKTGTYKISQEKYNGIMKEEGVDSDSEFKFTLYKNDLLLVKDTETKEQQLFRFLSRTMPNVKYYVELKPYSKDKFEKNESLIEILGSADKSGRCIKGLGKSNISIYKVRTDVLGNQHIIKNEGDKPKLDF

SEQ ID NO: 19 - protein, 1128 aa, Streptococcus thermophilus
MSDLVLGLDIGIGSVGVGILNKVTGEIIHKNSRIFPAAQAENNLVRRTNRQGRRLTRRKKHRIVRLNRLFEESGLITDFTKISINLNPYQLRVKGLTDELSNEELFIALKNMVKHRGISYLDDASDDGNSSVGDYAQIVKENSKQLETKTPGQIQLERYQTYGQLRGDFTVEKDGKKHRLINVFPTSAYRSEALRILQTQQEFNPQITDEFINRYLEILTGKRKYYHGPGNEKSRTDYGRYRTSGETLDNIFGILIGKCTFYPEEFRAAKASYTAQEFNLLNDLNNLTVPTETKKLSKEQKNQIINYVKNEKAMGPAKLFKYIAKLLSCDVADIKGYRIDKSGKAEIHTFEAYRKMKTLETLDIEQMDRETLDKLAYVLTLNTEREGIQEALEHEFADGSFSQKQVDELVQFRKANSSIFGKGWHNFSVKLMMELIPELYETSEEQMTILTRLGKQKRLRLQIKQNISNKTKYIDEKLLTEEIYNPVVAKSVRQAIKIVNAAIKEYGDFDNIVIEMARETNEDDEKKAIQKIQKANKDEKDAAMLKAANQYNGKAELPHSVFHGHKQLATKIRLWHQQGERCLYTGKTISIHDLINNPNQFEVDHILPLSITFDDSLANKVLVYATANQEKGQRTPYQALDSMDDAWSFRELKAFVRESKTLSNKKKEYLLTEEDISKFDVRKKFIERNLVDTRYASRVVLNALQEHFRAHKIDTKVSVVRGQFTSQLRRHWGIEKTRDTYHHHAVDALIIAASSQLNLWKKQKNTLVSYSEEQLLDIETGELISDDEYKESVFKAPYQHFVDTLKSKEFEDSILFSYQVDSKFNRKISDATIYATRQAKVGKDKKDETYVLGKIKDIYTQDGYDAFMKIYKKDKSKFLMYRHDPQTFEKVIEPILENYPNKQMNEKGKEVPCNPFLKYKEEHGYIRKYSKKGNGPEIKSLKYYDSKLLGNPIDITPENSKNKVVLQSLKPWRTDVYFNKATGKYEILGLKYADLQFEKGTGTYKISQEKYNDIKKKEGVDSDSEFKFTLYKNDLLLVKDTETKEQQLFRFLSRTLPKQKHYVELKPYDKQKFEGGEALIKVLGNVANGGQCIKGLAKSNISIYKVRTDVLGNQHIIKNEGDKPKLDF

SEQ ID NO: 20 - protein, 1123 aa, Francisella tularensis
MNVKILPIAIDLDVKNTGVFSAFYQKGTSLEKLDNKNGKVYELSKDSYTLLMNNRTARRHKRRGIDRKQLVKRLFKLVWTEQLNLEWDKDTQQAISFLFNRRGFSFITDGYSTEYLNIVPEQVKAILMDIFDDYNGEDDLDSYLKLATEQESKISEIYNKLMQKILEFKLRKLCTDIKDDKVSTKTLKEITSYEFELLADYLANYSESLKTQKFSYTDKQGNLKELSYYHHDKYNIQEFLKRHATINDEILGTLLTDDFDIWNFNFEKFDFDKNEEKLQNQEDKDHTQAHLHHFVFVVNKIKSEMASGGRHRSQYFQEITNVLDENNHQEGYLKNFCENLHNKKYSNLSVKNLVNLVGNLSNLELKPLRKYFNDKIHAKADHWDEQKFTETYCHWILGEWRVGVKDQDKKDGAKYSYKDLCNELKQKVTKAGLIDFLLELDPCRTIPPYLDNNNRKPPKCQSLILNPKFLDNQYPNWQQYLQELKKLQSIQDYLDSFETDLKDLKSSKDQPYFVEYKSSNQQMASGQRDYKDLDARILQFIFDRVKASDELLLNEIYFQAKKLKQKASSELEKLESSKKLDEVIANSQLSQILKSQHTNGIFEQGTFLHLVCKYYKQRQRARDSRLYIMPEYRYDKKLDKYNNTGRFDDNNQLLTYCNHKPRQKRYQLLNDLAGVLQVSRNQLLSSVEEWFQQAQRVGEISKSQDEQIFEWLKSFKIASYCKAAVEMQKQYRGTLKNAIQTAIFRQSENINKNKNTGNQQQALSENSKDVKSLTADEKKLLKLIENIAKASQKIGESLGLNDKQIKKFNSIYSFAQIQQIAFAKRKGNANTCAVCSADNAHRMQQIKITELVEDNKDNIILSAKAQRLPAIPTRIVDGAVKKMATILAKNIVDDNWQNIKQVLSAKHQLHIPIITESNAFEFEPALADVKGKSLKDRRKKALERISPENIFKDKNNRIKEFAKGISAYSGANLTDGDFDGAKEELDHIIPRSHKKYGTLNDEANLICVTRDDNKNIFAIDTSKWFEIETPSDLRDIGVATIQYKIDNNSRPKVRVKLDYVIDDDSKINYFMNHSLLKSRYPDKVLEILKQSTIIEFESSGFNKTIKEMLGMTLAGIYNETSNN

SEQ ID NO: 21 - protein, 1436 aa, Bacteroides fragilis
MKRILGLDLGTNSIGWALVNEAENKDERSSIVKLGVRVNPLTVDELTNFEKGKSITTNADRTLKRGMRRNLQRYKLRRETLTEVLKEHKLITEDTILSENGNRTTFETYRLRAKAVTEEISLEEFARVLLMINKKRGYKSSRKAKGVEEGTLIDGMDIARELYNNNLTPGELCLQLLDAGKKFLPDFYRSDLQNELDRIWEKQKEYYPEILTDVLKEELRGKKRDAVWAICAKYFVWKENYTEWNKEKGKTEQQEREHKLEGIYSKRKRDEAKRENLQWRVNGLKEKLSLEQLVIVFQEMNTQINNSSGYLGAISDRSKELYFNKQTVGQYQMEMLDKNPNASLRNMVFYRQDYLDEFNMLWEKQAVYHKELTEELKKEIRDIIIFYQRRLKSQKGLIGFCEFESRQIEVDIDGKKKIKTVGNRVISRSSPLFQEFKIWQILNNIEVTVVGKKRKRRKLKENYSALFEELNDAEQLELNGSRRLCQEEKELLAQELFIRDKMTKSEVLKLLFDNPQELDLNFKTIDGNKTGYALFQAYSKMIEMSGHEPVDFKKPVEKVVEYIKAVFDLLNWNTDILGFNSNEELDNQPYYKLWHLLYSFEGDNTPTGNGRLIQKMTELYGFEKEYATILANVSFQDDYGSLSAKAIHKILPHLKEGNRYDVACVYAGYRHSESSLTREEIANKVLKDRLMLLPKNSLHNPVVEKILNQMVNVINVIIDIYGKPDEIRVELARELKKNAKEREELTKSIAQTTKAHEEYKTLLQTEFGLTNVSRTDILRYKLYKELESCGYKTLYSNTYISREKLFSKEFDIEHIIPQARLFDDSFSNKTLEARSVNIEKGNKTAYDFVKEKFGESGADNSLEHYLNNIEDLFKSGKISKTKYNKLKMAEQDIPDGFIERDLRNTQYIAKKALSMLNEISHRVVATSGSVTDKLREDWQLIDVMKELNWEKYKALGLVEYFEDRDGRQIGRIKDWTKRNDHRHHAMDALTVAFTKDVFIQYFNNKNASLDPNANEHAIKNKYFQNGRAIAPMPLREFRAEAKKHLENTLISIKAKNKVITGNINKTRKKGGVNKNMQQTPRGQLHLETIYGSGKQYLTKEEKVNASFDMRKIGTVSKSAYRDALLKRLYENDNDPKKAFAGKNSLDKQPIWLDKEQMRKVPEKVKIVTLEAIYTIRKEISPDLKVDKVIDVGVRKILIDRLNEYGNDAKKAFSNLDKNPIWLNKEKGISIKRVTISGISNAQSLHVKKDKDGKPILDENGRNIPVDFVNTGNNHHVAVYYRPVIDKRGQLVVDEAGNPKYELEEVVVSFFEAVTRANLGLPIIDKDYKTTEGWQFLFSMKQNEYFVFPNEKTGFNPKEIDLLDVENYGLISPNLFRVQKFSLKNYVFRHHLETTIKDTSSILRGITWIDFRSSKGLDTIVKVRVNHIGQIVSVGEY

SEQ ID NO: 22 - protein, 1314 aa, Mycoplasma synoviae
MLRLYCANNLVLNNVQNLWKYLLLLIFDKKIIFLFKIKVILIRRYMENNNKEKIVIGFDLGVASVGWSIVNAETKEVIDLGVRLFSEPEKADYRRAKRTTRRLLRRKKFKREKFHKLILKNAEIFGLQSRNEILNVYKDQSSKYRNILKLKINALKEEIKPSELVWILRDYLQNRGYFYKNEKLTDEFVSNSFPSKKLHEHYEKYGFFRGSVKLDNKLDNKKDKAKEKDEEEESDAKKESEELIFSNKQWINEIVKVFENQSYLTESFKEEYLKLFNYVRPFNKGPGSKNSRTAYGVFSTDIDPETNKFKDYSNIWDKTIGKCSLFEEEIRAPKNLPSALIFNLQNEICTIKNEFTEFKNWWLNAEQKSEILKFVFTELFNWKDKKYSDKKFNKNLQDKIKKYLLNFALENFNLNEEILKNRDLENDTVLGLKGVKYYEKSNATADAALEFSSLKPLYVFIKFLKEKKLDLNYLLGLENTEILYFLDSIYLAISYSSDLKERNEWFKKLLKELYPKIKNNNLEIIENVEDIFEITDQEKFESFSKTHSLSREAFNHIIPLLLSNNEGKNYESLKHSNEELKKRTEKAELKAQQNQKYLKDNFLKEALVPLSVKTSVLQAIKIFNQIIKNFGKKYEISQVVIEMARELTKPNLEKLLNNATNSNIKILKEKLDQTEKFDDFTKKKFIDKIENSVVFRNKLFLWFEQDRKDPYTQLDIKINEIEDETEIDHVIPYSKSADDSWFNKLLVKKSTNQLKKNKTVWEYYQNESDPEAKWNKFVAWAKRIYLVQKSDKESKDNSEKNSIFKNKKPNLKFKNITKKLFDPYKDLGFLARNLNDTRYATKVFRDQLNNYSKHHSKDDENKLFKVVCMNGSITSFLRKSMWRKNEEQVYRFNFWKKDRDQFFHHAVDASIIAIFSLLTKTLYNKLRVYESYDVQRREDGVYLINKETGEVKKADKDYWKDQHNFLKIRENAIEIKNVLNNVDFQNQVRYSRKANTKLNTQLFNETLYGVKEFENNFYKLEKVNLFSRKDLRKFILEDLNEESEKNKKNENGSRKRILTEKYIVDEILQILENEEFKDSKSDINALNKYMDSLPSKFSEFFSQDFINKCKKENSLILTFDAIKHNDPKKVIKIKNLKFFREDATLKNKQAVHKDSKNQIKSFYESYKCVGFIWLKNKNDLEESIFVPINSRVIHFGDKDKDIFDFDSYNKEKLLNEINLKRPENKKFNSINEIEFVKFVKPGALLLNFENQQIYYISTLESSSLRAKIKLLNKMDKGKAVSMKKITNPDEYKIIEHVNPLGINLNWTKKLENNN

SEQ ID NO: 23 - protein, 1368 aa, Streptococcus pyogenes
MDKKYSIGLDIGTNSVGWAVITDDYKVPSKKFKVLGNTDRHSIKKNLIGALLFDSGETAEATRLKRTARRRYTRRKNRICYLQEIFSNEMAKVDDSFFHRLEESFLVEEDKKHERHPIFGNIVDEVAYHEKYPTIYHLRKKLVDSTDKADLRLIYLALAHMIKFRGHFLIEGDLNPDNSDVDKLFIQLVQTYNQLFEENPINASGVDAKAILSARLSKSRRLENLIAQLPGEKKNGLFGNLIALSLGLTPNFKSNFDLAEDAKLQLSKDTYDDDLDNLLAQIGDQYADLFLAAKNLSDAILLSDILRLNSEITKAPLSASMIKRYDEHHQDLTLLKALVRQQLPEKYKEIFFDQSKNGYAGYIDGGASQEEFYKFIKPILEKMDGTEELLAKLNREDLLRKQRTFDNGSIPHQIHLGELHAILRRQEDFYPFLKDNREKIEKILTFRIPYYVGPLARGNSRFAWMTRKSEETITPWNFEEVVDKGASAQSFIERMTNFDKNLPNEKVLPKHSLLYEYFTVYNELTKVKYVTEGMRKPAFLSGEQKKAIVDLLFKTNRKVTVKQLKEDYFKKIECFDSVEISGVEDRFNASLGTYHDLLKIIKDKDFLDNEENEDILEDIVLTLTLFEDREMIEERLKTYAHLFDDKVMKQLKRRRYTGWGRLSRKLINGIRDKQSGKTILDFLKSDGFANRNFMQLIHDDSLTFKEDIQKAQVSGQGDSLHEHIANLAGSPAIKKGILQTVKVVDELVKVMGRHKPENIVIEMARENQTTQKGQKNSRERMKRIEEGIKELGSQILKEHPVENTQLQNEKLYLYYLQNGRDMYVDQELDINRLSDYDVDHIVPQSFIKDDSIDNKVLTRSDKNRGKSNNVPSEEVVKKMKNYWRQLLNAKLITQRKFDNLTKAERGGLSELDKAGFIKRQLVETRQITKHVAQILDSRMNTKYDENDKLIREVKVITLKSKLVSDFRKDFQFYKVREINNYHHAHDAYLNAVVGTALIKKYPKLESEFVYGDYKVYDVRKMIAKSEQEIGKATAKYFFYSNIMNFFKTEITLANGEIRKRPLIETNGETGEIVWDKGRDFATVRKVLSMPQVNIVKKTEVQTGGFSKESILPKRNSDKLIARKKDWDPKKYGGFDSPTVAYSVLVVAKVEKGKSKKLKSVKELLGITIMERSSFEKNPIDFLEAKGYKEVRKDLIVKLPKYSLFELENGRKRMLASAGELQKGNELALPSKYVNFLYLASHYEKLKGSPEDNEQKQLFVEQHKHYLDEIIEQISEFSKRVILADANLDKVLSAYNKHRDKPIREQAENIIHLFTLTNLGAPAAFKYFDTTIDRKRYTSTKEVLDATFIHQSITGLYETRIDLSQLGGD

SEQ ID NO: 24 - protein, 1368 aa, Streptococcus pyogenes
MDKKYSIGLDIGTNSVGWAVITDDYKVPSKKFKVLGNTDRHSIKKNLIGALLFDSGETAEATRLKRTARRRYTRRKNRICYLQEIFSNEMAKVDDSFFHRLEESFLVEEDKKHERHPIFGNIVDEVAYHEKYPTIYHLRKKLVDSTDKADLRLIYLALAHMIKFRGHFLIEGDLNPDNSDVDKLFIQLVQTYNQLFEENPINASGVDAKAILSARLSKSRRLENLIAQLPGEKKNGLFGNLIALSLGLTPNFKSNFDLAEDAKLQLSKDTYDDDLDNLLAQIGDQYADLFLAAKNLSDAILLSDILRVNTEITKAPLSASMIKRYDEHHQDLTLLKALVRQQLPEKYKEIFFDQSKNGYAGYIDGGASQEEFYKFIKPILEKMDGTEELLVKLNREDLLRKQRTFDNGSIPHQIHLGELHAILRRQEDFYPFLKDNREKIEKILTFRIPYYVGPLARGNSRFAWMTRKSEETITPWNFEEVVDKGASAQSFIERMTNFDKNLPNEKVLPKHSLLYEYFTVYNELTKVKYVTEGMRKPAFLSGEQKKAIVDLLFKTNRKVTVKQLKEDYFKKIECFDSVEISGVEDRFNASLGTYHDLLKIIKDKDFLDNEENEDILEDIVLTLTLFEDREMIEERLKTYAHLFDDKVMKQLKRRRYTGWGRLSRKLINGIRDKQSGKTILDFLKSDGFANRNFMQLIHDDSLTFKEDIQKAQVSGQGDSLHEHIANLAGSPAIKKGILQTVKVVDELVKVMGRHKPENIVIEMARENQTTQKGQKNSRERMKRIEEGIKELGSQILKEHPVENTQLQNEKLYLYYLQNGRDMYVDQELDINRLSDYDVDHIVPQSFLKDDSIDNKVLTRSDKNRGKSDNVPSEEVVKKMKNYWRQLLNAKLITQRKFDNLTKAERGGLSELDKAGFIKRQLVETRQITKHVAQILDSRMNTKYDENDKLIREVKVITLKSKLVSDFRKDFQFYKVREINNYHHAHDAYLNAVVGTALIKKYPKLESEFVYGDYKVYDVRKMIAKSEQEIGKATAKYFFYSNIMNFFKTEITLANGEIRKRPLIETNGETGEIVWDKGRDFATVRKVLSMPQVNIVKKTEVQTGGFSKESILPKRNSDKLIARKKDWDPKKYGGFDSPTVAYSVLVVAKVEKGKSKKLKSVKELLGITIMERSSFEKNPIDFLEAKGYKEVKKDLIIKLPKYSLFELENGRKRMLASAGELQKGNELALPSKYVNFLYLASHYEKLKGSPEDNEQKQLFVEQHKHYLDEIIEQISEFSKRVILADANLDKVLSAYNKHRDKPIREQAENIIHLFTLTNLGAPAAFKYFDTTIDRKRYTSTKEVLDATLIHQSITGLYETRIDLSQLGGD

SEQ ID NO: 25 - protein, 1370 aa, Streptococcus agalactiae; identical to SEQ ID NO: 5

SEQ ID NO: 26 - protein, 1173 aa, Rhodospirillum rubrum
MRPIEPWILGLDIGTDSLGWAVFSCEEKGPPTAKELLGGGVRLFDSGRDAKDHTSRQAERGAFRRARRQTRTWPWRRDRLIALFQAAGLTPPAAETRQIALALRREAVSRPLAPDALWAALLHLAHHRGFRSNRIDKRERAAAKALAKAKPAKATAKATAPAKEADDEAGFWEGAEAALRQRMAASGAPTVGALLADDLDRGQPVRMRYNQSDRDGVVAPTRALIAEELAEIVARQSSAYPGLDWPAVTRLVLDQRPLRSKGAGPCAFLPGEDRALRALPTVQDFIIRQTLANLRLPSTSADEPRPLTDEEHAKALALLSTARFVEWPALRRALGLKRGVKFTAETERNGAKQAARGTAGNLTEAILAPLIPGWSGWDLDRKDRVFSDLWAARQDRSALLALIGDPRGPTRVTEDETAEAVADAIQIVLPTGRASLSAKAARAIAQAMAPGIGYDEAVTLALGLHHSHRPRQERLARLPYYAAALPDVGLDGDPVGPPPAEDDGAAAEAYYGRIGNISVHIALNETRKIVNALLHRHGPILRLVMVETTRELKAGADERKRMIAEQAERERENAEIDVELRKSDRWMANARERRQRVRLARRQNNLCPYTSTPIGHADLLGDAYDIDHVIPLARGGRDSLDNMVLCQSDANKTKGDKTPWEAFHDKPGWIAQRDDFLARLDPQTAKALAWRFADDAGERVARKSAEDEDQGFLPRQLTDTGYIARVALRYLSLVTNEPNAVVATNGRLTGLLRLAWDITPGPAPRDLLPTPRDALRDDTAARRFLDGLTPPPLAKAVEGAVQARLAALGRSRVADAGLADALGLTLASLGGGGKNRADHRHHFIDAAMIAVTTRGLINQINQASGAGRILDLRKWPRTNFEPPYPTFRAEVMKQWDHIHPSIRPAHRDGGSLHAATVFGVRNRPDARVLVQRKPVEKLFLDANAKPLPADKIAEIIDGFASPRMAKRFKALLARYQAAHPEVPPALAALAVARDPAFGPRGMTANTVIAGRSDGDGEDAGLITPFRANPKAAVRTMGNAVYEVWEIQVKGRPRWTHRVLTRFDRTQPAPPPPPENARLVMRLRRGDLVYWPLESGDRLFLVKKMAVDGRLALWPARLATGKATALYAQLSCPNINLNGDQGYCVQSAEGIRKEKIRTTSCTALGRLRLSKKAT

SEQ ID NO: 27 - protein, 997 aa, Maritimibacter alkaliphilus
MKVLVDAGLMPSDPAAAKALETLDPYELRATGLDVMLPLTHLGRAVFHLNQRRGFKSNRKTDRGDNESGKIKDATKRLTWAMQEAGARTYGEFLHMRRARASDPRQVPSVRTRLSVASRGGPDSKEEAGYDFYPERAHLEDEFHALWSAQAAFHPDLTCELRDVVFEKIFYQRPLKEPKVGLCLFTAEERLPKAHPLTGRRVLYETVNQLRVTADGRTTRPLTLEERDMIVYALDNKKPVKSLSSMHLKLVALGKLVKLKDGERFTLESGVRDAIACDPIRATMGHPDGFGPAWSRLDWQAQWALIEKLRQVQSDDDFASLVAWLGATHNLSEDHAKRVANLHLPEGYGRLGLTATEAILCNLKAEVCTYSQAVERWGKHHSNQRTGECLEALPYYGEVLDRHVIPGTYNEDDDDVTRYGRITNPTVHIGLNQLRRLVNRIIATYGKPDQIVVELARELKQSEAQKSEALKKIRDTTADAIRRGRQLEEIGQKNTGANRLLLRLWEDLGPAVGPRCCPYTGKPISVTMLFDGACDVDHILPYSRTLDDSFANRTICLREANRQKGDRTPWEAWGGSDQWDAIEANLKDLPENKRKRFAPDAMERFEGERDFLDRALVDTQYLARISRAYLDTLFTEGGHVWVVPGRMTEMLRRHWGLNALLSDKDRGAGKVKNRTDHRHHAIDAAVIAATDHSLVNRISKAAGQGESAGQSAELIARDTPEPWEGFRNDISAQIARIVVSHRADHGRIDVEGRKHGKDSTAGRLHNDTAYGIVDDHTVVSRTPLLSLKPGDIEVTTKGKNIRDTQLQKALSVATTGKDGKGFEEALRNFAEKEGPYQGIRRVRLIETLQSSARVEVGSDEDGQPLKAYKGDSNHCYDLWKLPDGKVVPHVVSTYEAHAGTDKRPHPAAKRILRVFKKDMVAIEQDDQTAIFYVQKLDRANGLFLAPHLEANADARHRNPNDAFKFLQMGAGSVVRNKLRRVYVDEIGRIKDPGPPKH

SEQ ID NO: 28 - protein, 1027 aa, Blastopirellula marina
MFSESGDQPSLVDCGVRIFPEGVERDQQGGEKSKSQSRRVARGIRRQVRRRAQRLRHLKHALITTGLFPADVVDQQEVLASNPYELRSRALSEKLEPYEIGRILLHLAKRRGFLSNRTTDRSGGNELKGILAEMTQLQGEIAAHGCQTLGQYLHQLGDDGETFAQRLRGRHTLRAMYEDEFEKIWERQASYYPALLTEELRGGEEGKQSYPLVPTARRKSESLLKRFGLHGLLFFQRKMYWPKSVIGRCDLEPKEKRCPKADRLAQRFRILQEVNNLRLISPADRKEYTFAEFVGAGADKKLVDYLCEAKERTFPQIRKKFKLPETISFNYERGERSKLQGHETDAHFNGKKGLGKRRWSEIAEDVKDHIIQIVLEEDREDVALRKLTQDCSLTVEEAHKAMALHLPAGYSQYSRVAISRLLPHLELGKLLMGNDASDSAMHAAGYLRPDEREVRQYDLLPEPPDIPNPLVRQALYEVRKVINAIIREYGALGTIRVELAREAKKSAEQRTQIRIANAKRERENAAIAKTLQEMSPAIRPTRRNIQRYLLWKDQGGVCIYTGKVISQAQLFDSGEVDVDHILPRWRSLDDSMANKVIAHRSANNEKGDRTPWEWLGHDKPRFDELLLRAQRLPYGKRQRFIQKEVELTNFVERQLRDTTYVSRLVVQYLKGLGVPITTVKGPMTAELRHHWGLNALLNEDGSQKKNRSDHRHHAIDAIVIGLTDAKRLHALANARGKDLQPPWSEFRSDVATALGRMAVSHRVRRRIQGALHEETIYGPTQKAAQPTSTDQRPWAKDWIEDSQIVVRRKSVSDLTNTKHLAKIRDVTIRKILEDHLRRQKVDPTKPGVIPKDAFAGSNAPQMPSGVPIKKVRLVERGETWRKIGSGEASKFIKPGSNHHISYFAISRKGRESWKAHVTIMLDAACIAKESINNGKIVNRSIGDQGRFLMSLSIGEMFEITNNGGEILLCVVRKIDQSGRIYYKIHDDARESMDLKKDNLYMSPSKMQQFDARKVTVTPLGKIRNAND

SEQ ID NO: 29 - protein, 158 aa, Francisella tularensis
MIDFLLELDPCITIPPYLDNNNRKPPKCQSLILNPKFLDNQYPNWQQYLQELKKLQSIQDYLDSFETDLKDLKSSKDQPYFVEYKSSNQQMASGQRDYKDLDARILQFIFDRVKASDELLLSEIYFQAKKLKQKASSELEKLESSKKLDEVIANSQLS

SEQ ID NO: 30 - protein, 393 aa, Francisella tularensis
MNVKILPIAIDLDVKNTGVFSAFYQKGTSLEKLDNKNGKVYELSKDSYTLLMNNRTAQRHQRRGIDRKQLVKRLFKLVWTEQLNLEWDKDTQQAISFLFNRRGFSFITDGYSTEYLNIVPEQVKAILMDIFDDYNGEDDLDSYLKLATEQESKISEIYNKLMQKILEFKLRKLCTDIKDDKVSTKTLKEITSYEFELLADYLANYSESLKTQKFSYTDKQGNLKELSYYHHDKYNIQEFLKRHATINDEILDTLLTDDFDIWNFNFEKFDFDKNEEKLQSQEDKDHTQAYFHHFVFAVNKIKSEMASGGRHRSQYFQEITNVLDENNHQEGYLKNFCENLHNKKYSNLSVKNLVNLVGNLSNLELKPLRKYFNDKNLIIGMSKSLQKLIATGY

SEQ ID NO: 31 - protein, 1066 aa, Rhodopseudomonas palustris
MSERVVRRILGIDLGIASCGWGVVDISGAGGGIIATGVRCFDAPLIDKTGEPKSATRRTARGQRRIVRRRRQRMNGVRRLLCEFGLLPDPRPDALNQAMRRISTASAAAQVTPWTLRAAAHQRLLSNEELAVVLGHIARHRGFRSNAKNEAGANAADETSKMKKAMEATREGLAKYHAFGDMIANDPKFANRKRNRDKDYSHTAKRSDLEDEVRAILRAQLRFGSAAATETLAQTFADVAFFQRPLQDSEDRVGDCPFEPGQKRAARRAPSFELFRFLSRLANLKLAVGRSPERRLTAEEIALAAKGFGETKKTITFKSLREALDLDPNARFSGIGKDKEASLDVVARTGGAAYGTKTLKDALGDAPWRSLSRTPETLDRIAEILSFREDITSIRNGLEDLGLDSLVVEALMQAAANGDFKEFTRAGHISARAARNIIPGLREGLVYSEACARVGYDHAARLSVPLDQVGSPVTRKALSEALKQVRAVAREYGPIDYFHIELARSVGKSAEERKQLTDGIEARNVEKAKRRKQAEEHLGRAPSDDELLRYELAKEQNFKCIYSGDAIDPAGVAANDTRYQVDHILPWSRFGDDSYLNKTLCTARSNQNKRGRTPFEWFEADKTDVEWMEYVARVENLQEVKGRKKRNYSIKDAAAIEDKFKARNLTDTQWATRLLADELSRMFPPRECERAICGRADGGNDGLTIVEERRVFTRPGAITSKLRRAWGLEGLKKQDGKRVEDDRHHAVDALVLAATTESLLQRLTVEVQRREREGRPDDIFHCAEPWRGFRADVRRTVYGSETMPGIFVSRAERRRARGKAHDATIKQIREIEGERLVFERKPVEKLTDKDLEKIPIPKPYGQVSDPKRLRDELVESLRAWIAAGKPKDRPPLSPKGDVIRKVRIQTNDKVSVEINGGTVDRGDMARVDVFRKKNKKAVWEYYVVPIYPHQIVALNDPPDRAVIAYAEDKDWKEIDSSYEFLWSLFGLSYVEISKANGECIDGYFRGLHRGTGAASVCKHISLGKDATVSGIGLKTLASFKKFTIDRLGRKFEIPREVRTWRGEACT

SEQ ID NO: 32 - protein, 1149 aa, Lactobacillus salivarius
MERYHIGLDIGTSSIGWAVIGDDFKIKRKKGKNLIGVRLFKEGDTAAERRGFRTQRRRLNRRKWRLKLLEEIFDPYMAEVDKYFFARLKESNLSPKDSNKKYLGSLLFPDISDSNFYDKYPTIYHLRRDLMEKDKKFDLREIYLAIHHIVKYRGNFLEKVPAKNYKNSGASIGFLLEEVNDLYGNIIGNEDVAILDNDKFEDVEKIILNDEIRNIDKQKNVGRLLVKDKKEKNIVTAFSKAIFGYKFNLEDLLLIESDEKNKLTFNDENIDDIFNELSHSLNDNQMDLLTKTREIYFKFKLNMIVPTGYTISESMIEKYEMHKAHLKMYKEFINTLNAKDRKILKNAYSDYINNEKAKAANAQENFYKTVKKTIKENDSDTAKKIIGLIDEGNFMPKQRTGENGVIPHQLHQIELDRIIENQAKYYPWLAEENPVEKNRKFAKYKLDELVTFRVPYYVGPLIDKTESNKNEKETKFAWMVRKAKGTITPWNFENLVDRTESANRFIKRMTSKDTYIIGEDVLPASSLLYEKYKVLNELNNIKVNKKKLDVEQKQHVYLDLFTTRKNVTKDDLATSLNCDVESITGLTDNKKFNSSLSSYIDLKAILGNIVDDYSKNEDLEKIIEYSTIFEDGNIYKEKLSEISWLTDEQIEKLSNIHFKGWGRLSKKLLTQITNENGERIIDTLWNTSNNFIQVISDESIQAKLAEINGEYANKYNLEDILDEAYTSPQNKKAIRQVMKVVEDIEKAMKCEPTSIAIEFTREKRKSKLTNTRYKKISETYEKITDELISEYELGKLQSELDSKVNNMRDRYYLYFMQLGRDMYTGEKMNIDELHQKYDIDHILPQSFIKDDSLNNRVLTSKSVNIKEKSDKTAADLYAAKMGDFWRKLRKQGLMTEQKYKNLLTRTDSINKYTKQSFIKRQLVETSQVVKLAANILQDKYRNTKIIEIRARLNSDLRKKYELIKNREVNDYHHAIDGYLTTFVGQYLYKVYPKLRSYFVYDDFKKLDSNYLKHMDKFNFIWKLEDKKAEDVYDKVNDEFVLNVPEMKEYIRKIYNYKYMLVSKEVTTKNGAFYDQTKYNAKTINLIPIKKDKPTNIYGGYKGKVSSYMMLVKIQKKKEVIYKFVGVPRLWTDELDRLIDTDEKKALLKK

SEQ ID NO: 33 - protein, 1064 aa, Rhodopseudomonas palustris
MSECVTRRILGIDLGIASCGWGVIEVGEASGSIIASGVRCFDAPLIDKTGEPKSATRRTARGQRRIIRRRRQRMNAVRRLLAEFGVLTGRSPDALHQALLRLSQSVAGSQVTPWTLRAAAHERKLTNDELAVVLGHIARHRGFRSNSKNDGGANAADETSKMKKAMETTREGLARYHSFGAMIASDPKFADRKRNRDKDYSHTAKRSDLEDEVRTIFRSQTRFGSLVASEKLSQAFADAAFFQRPLQDSEDMVGSCPFEPGQKRTARRAPSFELFRFLSRLANLKLTVGRAPERRLTPDEIALAAKGFGETKKSITFKSLREALDLDPNARFSGVAKEKESTLDVAARTGGAAYGTKTLKDALGDAPWRSLSRMPEKLDRIAEILSFREDMKAIRNGLEEVGLDGLVVDALMQATANGDFKDFTRAAHISALAARNIIPGLREGLVYSDACTRVGYDHAARPAVPLSQIGSPVTRKALSEALKQVRAVAREYGPIDYFHIELARSIGKSAEERKKLTDGIEARNVEKEKRRKEAAEHLGRAPSDDELLRYELAKEQNFKCIYSGDPIDPAGISANDTRYQVDHILPWSRFGDDSYVNKTLCTARSNQNKRGRTPFEWFDADKTEAEWMEYSARVEDLKEVKGRKKRNYSIKDAASVEDKFKARNLTDTQWATRLLADELKRMFPPRECERVVTVRADGGNDGLSIVEERRVFTRPGAITSKLRRAWGLEGLKKQDGKRVEDDRHHAVDALVLAATTESLLNRLTVEVQQREREGRQDDIFHCSQPWPGFRVDVQRTVYGSETMPGIFVSRAERRRARGKAHDATVKQIRDIDGERIVFERKPIEKLTDKDLERIPVPEPYGKAADPKKLRDELVENLRAWIAAGKPKDKPPRSPKGDIIRKVRIETKDKVAVEINGGTVDRGDMARVDVFRKKNKKGVWEFYVIPIYPHQIVASALPPNRAVIAYKAESEWTAIDGCFEFAWSLNPMSYLELVKSNGELIEGYFRSMDRTTGAINLSPMSTNSETIRSIGVKTLSSFRKFTVDRLGRKFEIPREVRTWRGEACT

SEQ ID NO: 34 - protein, 1166 aa, Nitrobacter hamburgensis
MHVEIDFPHFSRGDSHLAMNKNEILRGSSVLYRLGLDLGSNSLGWFVTHLEKRGDRHEPVALGPGGVRIFPDGRDPQSGTSNAVDRRMARGARKRRDRFVERRKELIAALIKYNLLPDDARERRALEVLDPYALRKTALTDTLPAHHVGRALFHLNQRRGFQSNRKTDSKQSEDGAIKQAASRLATDKGNETLGVFFADMHLRKSYEDRQTAIRAELVRLGKDHLTGNARKKIWAKVRKRLFGDEVLPRADAPHGVRARATITGTKASYDYYPTRDMLRDEFNAIWAGQSAHHATITDEARTEIEHIIFYQRPLKPAIVGKCTLDPATRPFKEDPEGYRAPWSHPLAQRFRILSEARNLEIRDTGKGSRRLTKEQSDLVVAALLANREVKFDKLRTLLKLPAEARFNLESDRRAALDGDQTAARLSDKKGFNKAWRGFPPERQIAIVARLEETEDENELIAWLEKECALDGAAAARVANTTLPDGHCRLGLRAIKKIVPIMQDGLDEDGVAGAGYHIAAKRAGYDHAKLPTGEQLGRLPYYGQWLQDAVVGSGDARDQKEKQYGQFPNPTVHIGLGQLRRVVNDLIDKYGPPTEISIEFTRALKLSEQQKAERQREQRRNQDKNKARAEELAKFGRPANPRNLLKMRLWEELAHDPLDRKCVYTGEQISIERLLSDEVDIDHILPVAMTLDDSPANKIICMRYANRHKRKQTPSEAFGSSPTLQGHRYNWDDIAARATGLPRNKRWRFDANAREEFDKRGGFLARQLNETGWLARLAKQYLGAVTDPNQIWVVPGRLTSMLRGKWGLNGLLPSDNYAGVQDKAEEFLASTDDMEFSGVKNRADHRHHAIDGLVTALTDRSLLWKMANAYDEEHEKFVIEPPWPTMRDDLKAALEKMVVSHKPDHGIEGKLHEDSAYGFVKPLDATGLKEEEAGNLVYRKAIESLNENEVDRIRDIQLRTIVRDHVNVEKTKGVALADALRQLQAPSDDYPQFKHGLRHVRILKKEKGDYLVPIANRASGVAYKAYSAGENFCVEVFETAGGKWDGEAVRRFDANKKNAGPKIAHAPQWRDANEGAKLVMRIHKGDLIRLDHEGRARIMVVHRLDAAAGRFKLADHNETGNLDKRHATNNDIDPFRWLMASYNTLKKLAAVPVRVDELGRVWRVMPN

SEQ ID NO: 35 - protein, 641 aa, Nitrobacter hamburgensis
MHKRNSRSYRLGLDLGSNSLGWFVTHLEKRGDRYEPVALDPGGVRIFPDGRDPQSGMSNAVDRRMARGARKRRDRFVDPYALRKAALTNALPAHRVGRAIFHLNQRRGFQSNRKTDRKQSEDGAIKQAASKLKARMHEEAAPTLGAFFADMHLRKSYDDQQTAIRAELVRLGKDHLTGNARKKVWAKVRKRLFGDEVLRPKDTSDGARARATTTGTKASYDFYPTRAMLLDEFNAIWAAQREHHLAMTDEAKAEIEHIIFYHRPLKPAIVGKCTLDPATRPFKEDPEGYRAPWSHPLAQRFRILSEARNLEIRETGKTSRRLTKDQSDLVVAALLANREVKFDKLRTLLKLPAEARFNLESDRRSTATRPPHGCRTRRASIRRGAGFLRNGRSRSSPDWKKPKTKTNCSHGSKWNAHLTAQRPRASPIRRCRTAIAGSACAQSKRSCRSCRTSSMRMALRAPAITSWPSVPATTIPVDTFQQGGNAFGRILSVVTIELFAITDRVDPVQEQDARCFALRIAECRSDGLQHFAEVSLGLPPRNAAQDQRHSAGLCQSSCVGRFVPGTPCRRTPRSTSLHGKEPSAHAFGSTARSRPQLPASPRPCMSFRDGTSSSPARMPETLDRCAISRSNRSSVCRAERL

SEQ ID NO: 36 - protein, 1368 aa, Streptococcus pyogenes
MDKKYSIGLDIGTNSVGWAVITDDYKVPSKKFKVLGNTDRHSIKKNLIGALLFDSGEIAEATRLKRTARRRYTRRKNRICYLQEIFSNEMAKVDDSFFHRLEESFLVEEDKKHERHPIFGNIVDEVAYHEKYPTIYHLRKKLVDSTDKADLRLIYLALAHMIKFRGHFLIEGDLNPDNSDVDKLFIQLVQTYNQLFEENPINASGVDAKAILSARLSKSRRLENLIAQLPGEKKNGLFGNLIALSLGLTPNFKSNFDLAEDAKLQLSKDTYDDDLDNLLAQIGDQYADLFLAAKNLSDAILLSDILRLNSEITKAPLSASMIKRYDEHHQDLTLLKALVRQQLPEKYKEIFFDQSKNGYAGYIDGGASQEEFYKFIKPILEKMDGTEELLAKLNREDLLRKQRTFDNGSIPHQIHLGELHAILRRQEDFYPFLKDNREKIEKILTFRIPYYVGPLARGNSRFAWMTRKSEETITPWNFEEVVDKGASAQSFIERMTNFDKNLPNEKVLPKHSLLYEYFTVYNELTKVKYVTEGMRKPAFLSGEQKKAIVDLLFKTNRKVTVKQLKEDYFKKIECFDSVEISGVEDRFNASLGTYHDLLKIIKDKDFLDNEENEDILEDIVLTLTLFEDREMIEERLKTYAHLFDDKVMKQLKRRRYTVWGRLSRKLINGIRDKQSGKTILDFLKSDGFANRNFMQLIHDDSLTFKEDIQKAQVSGQGDSLHEHIANLAGSPAIKKGILQTVKVVDELVKVMGRHKPENIVIEMARENQTTQKGQKNSRERMKRIEEGIKELGSQILKEHPVENTQLQNEKLYLYYLQNGRDMYVDQELDINRLSDYDVDHIVPQSFIKDDSIDNKVLTRSDKNRGKSDNVPSEEVVKKMKNYWRQLLNAKLITQRKFDNLTKAERGGLSELDKAGFIKRQLVETRQITKHVAQILDSRMNTKYDENDKLIREVKVITLKSKLVSDFRKDFQFYKVREINNYHHAHDAYLNAVVGTALIKKYPKLESEFVYGDYKVYDVRKMLAKSEQEIGKATAKYFFYSNIMNFFKTEITLANGEIRKRPLIETNGETGEIVWDKGRDFATVRKVLSMPQVNIVKKTEVQTGGFSKESILPKRNSDKLIARKKDWDPKKYGGFDSPTVAYSVLVVAKVEKGKSKKLKSVKELLGITIMERSSFEKNPIDFLEAKGYKEVRKDLIIKLPKYSLFELENGRKRMLASAGELQKGNELALPSKYVNFLYLASHYEKLKGSPEDNEQKQLFVEQHKHYLDEIIEQISEFSKRVILADANLDKVLSAYNKHRDKPIREQAENIIHLFTLTNLGAPTAFKYFDTTIDRKRYTSTKEVLDATFIHQSITGLYETRIDLSQLGGD

SEQ ID NO: 37 - protein, 1368 aa, Streptococcus pyogenes
MDKKYSIGLDIGTNSVGWAVITDDYKVPSKKFKVLGNTDRHSIKKNLIGALLFDSGETAEATRLKRTARRRYTRRKNRICYLQEIFSNEMAKVDDSFFHRLEESFLVEEDKKHERHPIFGNIVDEVAYHEKYPTIYHLRKKLVDSTDKADLRLIYLALAHMIKFRGHFLIEGDLNPDNSDVDKLFIQLVQTYNQLFEENPINASGVDAKAILSARLSKSRRLENLIAQLPGEKKNGLFGNLIALSLGLTPNFKSNFDLAEDAKLQLSKDTYDDDLDNLLAQIGDQYADLFLAAKNLSDAILLSDILRLNSEITKAPLSASMIKRYDEHHQDLTLLKALVRQQLPEKYKEIFFDQSKNGYAGYIDGGASQEEFYKFIKPILEKMDGTEELLAKLNREDLLRKQRTFDNGSIPHQIHLGELHAILRRQEDFYPFLKDNREKIEKILTFRIPYYVGPLARGNSRFAWMTRKSEETITPWNFEEVVDKGASAQSFIERMTNFDKNLPNEKVLPKHSLLYEYFTVYNELTKVKYVTEGMRKPAFLSGEQKKAIVDLLFKTNRKVTVKQLKEDYFKKIECFDSVEISGVEDRFNASLGTYHDLLKIIKDKDFLDNEENEDILEDIVLTLTLFEDREMIEERLKTYAHLFDDKVMKQLKRRRYTGWGRLSRKLINGIRDKQSGKTILDFLKSDGFANRNFMQLIHDDSLTFKEDIQKAQVSGQGDSLHEHIANLAGSPAIKKGILQTVKVVDELVKVMGRHKPENIVIEMARENQTTQKGQKNSRERMKRIEEGIKELGSQILKEHPVENTQLQNEKLYLYYLQNGRDMYVDQELDINRLSDYDVDHIVPQSFIKDDSIDNKVLTRSDKNRGKSDNVPSEEVVKKMKNYWRQLLNAKLITQRKFDNLTKAERGGLSELDKAGFIKRQLVETRQITKHVAQILDSRMNTKYDENDKLIREVKVITLKSKLVSDFRKDFQFYKVREINNYHHAHDAYLNAVVGTALIKKYPKLESEFVYGDYKVYDVRKMIAKSEQEIGKATAKYFFYSNIMNFFKTEITLANGEIRKRPLIETNGETGEIVWDKGRDFATVRKVLSMPQVNIVKKTEVQTGGFSKESILPKRNSDKLIARKKDWDPKKYGGFDSPTVAYSVLVVAKVEKGKSKKLKSVKELLGLTIMERSSFEKNPIDFLEAKGYKEVKKDLIIKLPKYSLFELENGRKRMLASAGELQKGNELALPSKYVNFLYLASHYEKLKGSPEDNEQKQLFVEQHKHYLDEIIEQISEFSKRVILADANLDKVLSAYNKHRDKPIREQAENIIHLFTLTNLGAPAAFKYFDTTIDRKRYTSTKEVLDATLIHQSITGLYETRIDLSQLGGD

SEQ ID NO: 38 - protein, 1368 aa, Streptococcus pyogenes
MDKKYSIGLDIGTNSVGWAVITDDYKVPSKKFKVLGNTDRHSIKKNLIGALLFDSGEIAEATRLKRTARRRYTRRKNRICYLQEIFSNEMAKVDDSFFHRLEESFLVEEDKKHERHPIFGNIVDEVAYHEKYPTIYHLRKKLVDSTDKADLRLIYLALAHMIKFRGHFLIEGDLNPDNSDVDKLFIQLVQTYNQLFEENPINASGVDAKAILSARLSKSRRLENLIAQLPGEKKNGLFGNLIALSLGLTPNFKSNFDLAEDAKLQLSKDTYDDDLDNLLAQIGDQYADLFLAAKNLSDAILLSDILRLNSEITKAPLSASMIKRYDEHHQDLTLLKALVRQQLPEKYKEIFFDQSKNGYAGYIDGGASQEEFYKFIKPILEKMDGTEELLAKLNREDLLRKQRTFDNGSIPHQIHLGELHAILRRQEDFYPFLKDNREKIEKILTFRIPYYVGPLARGNSRFAWMTRKSEETITPWNFEEVVDKGASAQSFIERMTNFDKNLPNEKVLPKHSLLYEYFTVYNELTKVKYVTEGMRKPAFLSGEQKKAIVDLLFKTNRKVTVKQLKEDYFKKIECFDSVEISGVEDRFNASLGTYHDLLKIIKDKDFLDNEENEDILEDIVLTLTLFEDREMIEERLKTYAHLFDDKVMKQLKRRRYTGWGRLSRKLINGIRDKQSGKTILDFLKSDGFANRNFMQLIHDDSLTFKEDIQKAQVSGQGDSLHEHIANLAGSPAIKKGILQTVKVVDELVKVMGRHKPENIVIEMARENQTTQKGQKNSRERMKRIEEGIKELGSQILKEHPVENTQLQNEKLYLYYLQNGRDMYVDQELDINRLSDYDVDHIVPQSFIKDDSIDNKVLTRSDKNRGKSDNVPSEEVVKKMKNYWRQLLNAKLITQRKFDNLTKAERGGLSELDKAGFIKRQLVETRQITKHVAQILDSRMNTKYDENDKLIREVKVITLKSKLVSDFRKDFQFYKVREINNYHHAHDAYLNAVVGTALIKKYPKLESEFVYGDYKVYDVRKMLAKSEQEIGKATAKYFFYSNIMNFFKTEITLANGEIRKRPLIETNGETGEIVWDKGRDFATVRKVLSMPQVNIVKKTEVQTGGFSKESILPKRNSDKLIARKKDWDPKKYGGFDSPTVAYSVLVVAKVEKGKSKKLKSVKELLGITIMERSSFEKNPIDFLEAKGYKEVRKDLIIKLPKYSLFELENGRKRMLASAGELQKGNELALPSKYVNFLYLASHYEKLKGSPEDNEQKQLFVEQHKHYLDEIIEQISEFSKRVILADANLDKVLSAYNKHRDKPIREQAENIIHLFTLTNLGAPTAFKYFDTTIDRKRYTSTKEVLDATFIHQSITGLYETRIDLSQLGGD

SEQ ID NO: 39 - protein, 1371 aa, Streptococcus pyogenes
MDKKYSIGLDIGTNSVGWAVITDDYKVPSKKFKVLGNTDRHSIKKNLIGALLFDSGETAEATRLKRTARRRYTRRKNRICYLQEIFSNEMAKVDDSFFHRLEESFLVEEDKKHERHPIFGNIVDEVAYHEKYPTIYHLRKKLADSTDKADLRLIYLALAHMIKFRGHFLIEGDLNPDNSDVDKLFIQLVQTYNQLFEENPINASRVDAKAILSARLSKSRRLENLIAQLPGEKKNGLFGNLIALSLGLTPNFKSNFDLAEDAKLQLSKDTYDDDLDNLLAQIGDQYADLFLAAKNLSDATLLSDILRVNSEITKAPLSASMIKRYDEHHQDLTLLKALVRQQLPEKYKEIFFDQSKNGYAGYIDGGASQEEFYKFIKPILEKMDGTEELLAKLNREDLLRKQRTFDNGSIPHQIHLGELHAILRRQEDFYPFLKDNREKIEKILTFRIPYYVGPLARGNSRFAWMTRKSEETITPWNFEEVVDKGASAQSFIERMTNFDKNLPNEKVLPKHSLLYEYFTVYNELTKVKYVTEGMRKPAFLSGEQKKAIVDLLFKTNRKVTVKQLKEDYFKKIECFDSVEISGVEDRFNASLGTYHDLLKIIKDKDFLDNEENEDILEDIVLTLTLFEDKEMIEERLKTYAHLFDDKVMKQLKRRHYTGWGRLSRKLINGIRDKQSGKTILDFLKSDGFANRNFIQLIHDDSLTFKEAIQKAQVSGQGHSLHEQIANLAGSPAIKKGILQSVKVVDELVKVMGHKPENIVIEMARENQTTQKGQKNSRERMKRIEEGIKELGSQILKEHPVENTQLQNEKLYLYYLQNGRDMYVDQELDINRLSDYDVDHIVPQSFIKDDSIDNKVLTRSDKNRGKSDDVPSEEVVKKMKNYWRQLLNAKLITQRKFDNLTKAERGGLSELDKAGFIKRQLVETRQITKHVAQILDSRMNTKYDENDKLIREVKVITLKSKLVSDFRKDFQFYKVREINNYHHAHDAYLNAVVGTALIKKYPKLESEFVYGDYKVYDVRKMIAKSEQEIGKATAKRFFYSNIMNFFKTEITLANGEIRKRPLIETNEETGEIVWDKGRDFATVRKVLSMPQVNIVKKTEVQTGALTNESIYARGSFDKLISRKHRFESSKYGGFGSPTVTYSVLVVAKSKVQDGKVKKIKTGKELIGITLLDKLVFEKNPLKFIEDKGYGNVQIDKCIKLPKYSLFEFENGTRRMLASVMANNNSRGDLQKANEMFLPAKLVTLLYHAHKIESSKELEHEAYILDHYNDLYQLLSYIERFASLYVDVEKNISKVKELFSNIESYSISEICSSVINLLTLTASGAPADFKFLGTTIPRKRYGSPQSILSSTLIHQSITGLYETRIDLSQLGSD

SEQ ID NO: 40 - protein, 1121 aa, Streptococcus thermophilus
MSDLVLGLDIGIGSVGVGILNKVTGEIIHKNSRIFPAAQAENNLVRRTNRQGRRLARRKKHRRVRLNRLFEESGLITDFTKISINLNPYQLRVKGLTDELSNEELFIALKNMVKHRGISYLDDASDDGNSSVGDYAQIVKENSKQLETKTPGQIQLERYQTYGQLRGDFTVEKDGKKHRLINVFPTSAYRSEALRILQTQQEFNPQITDEFINRYLEILTGKRKYYHGPGNEKSRTDYGRYRTSGETLDNIFGILIGKCTFYPDEFRAAKASYTAQEFNLLNDLNNLTVPTETKKLSKEQKNQIINYVKNEKAMGPAKLFKYIAKLLSCDVADIKGYRIDKSGKAEIHTFEAYRKMKTLETLDIEQMDRETLDKLAYVLTLNTEREGIQEALEHEFADGSFSQKQVDELVQFRKANSSIFGKGWHNFSVKLMMELIPELYETSEEQMTILTRLGKQKTTSSSNKTKYIDEKLLTEEIYNPVVAKSVRQAIKIVNAAIKEYGDFDNIVIEMARETNEDDEKKAIQKIQKANKDEKDAAMLKAANQYNGKAELPHSVFHGHKQLATKIRLWHQQGERCLYTGKTISIHDLINNSNQFEVDHILPLSITFDDSLANKVLVYATANQEKGQRTPYQALDSMDDAWSFRELKAFVRESKTLSNKKKEYLLTEEDISKFDVRKKFIERNLVDTRYASRVVLNALQEHFRAHKIDTKVSVVRGQFTSQLRRHWGIEKTRDTYHHHAVDALIIAASSQLNLWKKQKNTLVSYSEDQLLDIETGELISDDEYKESVFKAPYQHFVDTLKSKEFEDSILFSYQVDSKFNRKISDATIYATRQAKVGKDKADETYVLGKIKDIYTQDGYDAFMKIYKKDKSKFLMYRHDPQTFEKVIEPILENYPNKQINEKGKEVPCNPFLKYKEEHGYIRKYSKKGNGPEIKSLKYYDSKLGNHIDITPKDSNNKVVLQSVSPWRADVYFNKTTGKYEILGLKYADLQFEKGTGTYKISQEKYNDIKKKEGVDSDSEFKFTLYKNDLLLVKDTETKEQQLFRFLSRTMPKQKHYVELKPYDKQKFEGGEALIKVLGNVANSGQCKKGLGKSNISIYKVRTDVLGNQHIIKNEGDKPKLDF

SEQ ID NO: 41 - protein, 1388 aa, Streptococcus thermophilus
MTKPYSIGLDIGTNSVGWAVTTDNYKVPSKKMKVLGNTSKKYIKKNLLGVLLFDSGITAEGRRLKRTARRRYTRRRNRILYLQEIFSTEMATLDDAFFQRLDDSFLVPDDKRDSKYPIFGNLVEEKAYHDEFPTIYHLRKYLADSTKKADLRLVYLALAHMIKYRGHFLIEGEFNSKNNDIQKNFQDFLDTYNAIFESDLSLENSKQLEEIVKDKISKLEKKDRILKLFPGEKNSGIFSEFLKLIVGNQADFRKCFNLDEKASLHFSKESYDEDLETLLGYIGDDYSDVFLKAKKLYDAILLSGFLTVTDNETEAPLSSAMIKRYNEHKEDLALLKEYIRNISLKTYNEVFKDDTKNGYAGYIDGKTNQEDFYVYLKKLLAEFEGADYFLEKIDREDFLRKQRTFDNGSIPYQIHLQEMRAILDKQAKFYPFLAKNKERIEKILTFRIPYYVGPLARGNSDFAWSIRKRNEKITPWNFEDVIDKESSAEAFINRMTSFDLYLPEEKVLPKHSLLYETFNVYNELTKVRFIAESMRDYQFLDSKQKKDIVRLYFKDKRKVTDKDIIEYLHAIYGYDGIELKGIEKQFNSSLSTYHDLLNIINDKEFLDDSSNEAIIEEIIHTLTIFEDREMIKQRLSKFENIFDKSVLKKLSRRHYTGWGKLSAKLINGIRDEKSGNTILDYLIDDGISNRNFMQLIHDDALSFKKKIQKAQIIGDEDKGNIKEVVKSLPGSPAIKKGILQSIKIVDELVKVMGGRKPESIVVEMARENQYTNQGKSNSQQRLKRLEKSLKELGSKILKENIPAKLSKIDNNALQNDRLYLYYLQNGKDMYTGDDLDIDRLSNYDIDHIIPQAFLKDNSIDNKVLVSSASNRGKSDDVPSLEVVKKRKTFWYQLLKSKLISQRKFDNLTKAERGGLSPEDKAGFIQRQLVETRQITKHVARLLDEKFNNKKDENNRAVRTVKIITLKSTLVSQFRKDFELYKVREINDFHHAHDAYLNAVVASALLKKYPKLEPEFVYGDYPKYNSFRERKSATEKVYFYSNIMNIFKKSISLADGRVIERPLIEVNEETGESVWNKESDLATVRRVLSYPQVNVVKKVEEQNHGLDRGKPKGLFNANLSSKPKPNSNENLVGAKEYLDPKKYGGYAGISNSFTVLVKGTIEKGAKKKITNVLEFQGISILDRINYRKDKLNFLLEKGYKDIELIIELPKYSLFELSDGSRRMLASILSTNNKRGEIHKGNQIFLSQKFVKLLYHAKRISNTINENHRKYVENHKKEFEELFYYILEFNENYVGAKKNGKLLNSAFQSWQNHSIDELCSSFIGPTGSERKGLFELTSRGSAADFEFLGVKIPRYRDYTPSSLLKDATLIHQSVTGLYETRIDLAKLGEG

SEQ ID NO: 42 - protein, 1138 aa, Acidothermus cellulolyticus
MGGSEVGTVPVTWRLGVDVGERSIGLAAVSYEEDKPKEILAAVSWIHDGGVGDERSGASRLALRGMARRARRLRRFRRARLRDLDMLLSELGWTPLPDKNVSPVDAWLARKRLAEEYVVDETERRRLLGYAVSHMARHRGWRNPWTTIKDLKNLPQPSDSWERTRESLEARYSVSLEPGTVGQWAGYLLQRAPGIRLNPTQQSAGRRAELSNATAFETRLRQEDVLWELRCIADVQGLPEDVVSNVIDAVFCQKRPSVPAERIGRDPLDPSQLRASRACLEFQEYRIVAAVANLRIRDGSGSRPLSLEERNAVIEALLAQTERSLTWSDIALEILKLPNESDLTSVPEEDGPSSLAYSQFAPFDETSARIAEFIAKNRRKIPTFAQWWQEQDRTSRSDLVAALADNSIAGEEEQELLVHLPDAELEALEGLALPSGRVAYSRLTLSGLTRVMRDDGVDVHNARKTCFGVDDNWRPPLPALHEATGHPVVDRNLAILRKFLSSATMRWGPPQSIVVELARGASESRERQAEEEAARRAHRKANDRIRAELRASGLSDPSPADLVRARLLELYDCHCMYCGAPISWENSELDHIVPRTDGGSNRHENLAITCGACNKEKGRRPFASWAETSNRVQLRDVIDRVQKLKYSGNMYWTRDEFSRYKKSVVARLKRRTSDPEVIQSIESTGYAAVALRDRLLSYGEKNGVAQVAVFRGGVTAEARRWLDISIERLFSRVAIFAQSTSTKRLDRRHHAVDAVVLTTLTPGVAKTLADARSRRVSAEFWRRPSDVNRHSTEEPQSPAYRQWKESCSGLGDLLISTAARDSIAVAAPLRLRPTGALHEETLRAFSEHTVGAAWKGAELRRIVEPEVYAAFLALTDPGGRFLKVSPSEDVLPADENRHIVLSDRVLGPRDRVKLFPDDRGSIRVRGGAAYIASFHHARVFRWGSSHSPSFALLRVSLADLAVAGLLRDGVDVFTAELPPWTPAWRYASIALVKAVESGDAKQVGWLVPGDELDFGPEGVTTAAGDLSMFLKYFPERHWVVTGFEDDKRINLKPAFLSAEQAEVLRTERSDRPDTLTEAGEILAQFFPRCWRATVAKVLCHPGLTVIRRTALGQPRWRRGHLPYSWRPWSADPWSGGTP

SEQ ID NO: 43 - protein, 1629 aa, unidentified
  source 1..1629: note = Francisella novicida
MNFKILPIAIDLGVKNTGVFSAFYQKGTSLERLDNKNGKVYELSKDSYTLLMNNRTARRHQRRGIDRKQLVKRLFKLIWTEQLNLEWDKDTQQAISFLFNRRGFSFITDGYSPEYLNIVPEQVKAILMDIFDDYNGEDDLDSYLKLATEQESKISEIYNKLMQKILEFKLMKLCTDIKDDKVSTKTLKEITSYEFELLADYLANYSESLKTQKFSYTDKQGNLKELSYYHHDKYNIQEFLKRHATINDRILDTLLTDDLDIWNFNFEKFDFDKNEEKLQNQEDKDHIQAHLHHFVFAVNKIKSEMASGGRHRSQYFQEITNVLDENNHQEGYLKNFCENLHNKKYSNLSVKNLVNLIGNLSNLELKPLRKYFNDKIHAKADHWDEQKFTETYCHWILGEWRVGVKDQDKKDGAKYSYKDLCNELKQKVTKAGLVDFLLELDPCRTIPPYLDNNNRKPPKCQSLILNPKFLDNQYPNWQQYLQELKKLQSIQNYLDSFETDLKVLKSSKDQPYFVEYKSSNQQIASGQRDYKDLDARILQFIFDRVKASDELLLNEIYFQAKKLKQKASSELEKLESSKKLDEVIANSQLSQILKSQHTNGIFEQGTFLHLVCKYYKQRQRARDSRLYIMPEYRYDKKLHKYNNTGRFDDDNQLLTYCNHKPRQKRYQLLNDLAGVLQVSPNFLKDKIGSDDDLFISKWLVEHIRGFKKACEDSLKIQKDNRGLLNHKINIARNTKGKCEKEIFNLICKIEGSEDKKGNYKHGLAYELGVLLFGEPNEASKPEFDRKIKKFNSIYSFAQIQQIAFAERKGNANTCAVCSADNAHRMQQIKITEPVEDNKDKIILSAKAQRLPAIPTRIVDGAVKKMATILAKNIVDDNWQNIKQVLSAKHQLHIPIITESNAFEFEPALADVKGKSLKDRRKKALERISPENIFKDKNNRIKEFAKGISAYSGANLTDGDFDGAKEELDHIIPRSHKKYGTLNDEANLICVTRGDNKNKGNRIFCLRDLADNYKLKQFETTDDLEIEKKIADTIWDANKKDFKFGNYRSFINLTPQEQKAFRHALFLADENPIKQAVIRAINNRNRTFVNGTQRYFAEVLANNIYLRAKKENLNTDKISFDYFGIPTIGNGRGIAEIRQLYEKVDSDIQAYAKGDKPQASYSHLIDAMLAFCIAADEHRNDGSIGLEIDKNYSLYPLDKNTGEVFTKDIFSQIKITDNEFSDKKLVRKKAIEGFNTHRQMTRDGIYAENYLPILIHKELNEVRKGYTWKNSEEIKIFKGKKYDIQQLNNLVYCLKFVDKPISIDIQISTLEELRNILTTNNIAATAEYYYINLKTQKLHEYYIENYNTALGYKKYSKEMEFLRSLAYRSERVKIKSIDDVKQVLDKDSNFIIGKITLPFKKEWQRLYREWQNTTIKDDYEFLKSFFNVKSITKLHKKVRKDFSLPISTNEGKFLVKRKTWDNNFIYQILNDSDSRADGTKPFIPAFDISKNEIVEAIIDSFTSKNIFWLPKNIELQKVDNKNIFAIDTSKWFEVETPSDLRDIGIATIQYKIDNNSRPKVRVKLDYVIDDDSKINYFMNHSLLKSRYPDKVLEILKQSTIIEFESSGFNKTIKEMLGMKLAGIYNETSNN

SEQ ID NO: 44 - protein, 1068 aa, Verminephrobacter eiseniae
MNKAVAYRLALDLGSTSLGWAIFRLNEAREPTAIIRAGVRIFSDGRNANSEPLAVHRRVARAMRRRRDRLLKRKKRMHDQLVQHGFFPAEVAERKELERLNPYQLRAKGLHEALTPGEFARALFHINQRRGFKSNRKTDRKDNDSGALKQAISELRKRIQDSDCATAGEWFWKERMQQKPEGVRGQWVRARYRKTPSTTDEGKKRIGYDLYVDRAMVEQEFDALWAAQAALQPGLFTEAARAELKDTLLYQRDLRPVKPGRCTLLPAEERAPLALPSTQRFRILQEVNNLRLLDEALREVPLNLAQRDAVVSALEGKKELSFAAIRKLLTLSGKFNLEDEKRAELKGNATSVILARKDLFGDAWAGFDAAVQDEIVWRLVSQESEGALIAWLQQHTGVDGVCAEAIVNTRLPDGYGRLSRKALERIVPALQREVCTYDKAVQAAGFAHHSDLGFDFDYAEDEVQQVGEHTIASTGEVQAQYAFKQLPYYGKALQRHVAFGSGDAKDHEEKCYGKIANPTVHIGLNQVRTVVNALIRRYGHPTEVVVELARDLKQSREQKQQTQREQADNQKRNEDIRKRIAPILETSPERVRDRDIKKWILWEELNKKDIADRHCPYSGERISATMLLSEAVEIEHILPFSRTLDDSLNNRTVAMRRANRIKGDRTPWEARADFEAQGWRYEAILQRAEGMPPRKRYRFAEDGYQRWLGKDRNFLARALNDTSYLSRLAANYLRLVCPQGVRVIPGQMTDKLRGKFGLNSVLGLDGKKNRNDHRHHAVDACVIGVTDQGLMQRFANASKQARENGLTRLVQDMLLPWWPSYYDHVERAVRHIRVSHRPDHGFEGAMMKGTAHGIREDGIREDGRIKQRPKAKGSADHKTITLIPIDEPRQLARHGVDAEGKPLPYKGYASGSNYCIEITKNGKGKWEGQVISTFDAYRIKAAADAAARAGQVISTVEADSIVRKSGWERLRGAQSQNGQPLVMRLVIGDSVRMEVDGRDEVMRVVKMSGKEMVFAPVREANVDKRNNMPDEQDPFTYTYKRADQLRKAKARQVTISPIGELRDPGFKG

SEQ ID NO: 45 - protein, 1125 aa, Francisella tularensis
MNVKILPIAIDLDVKNTGVFSAFYQKGTSLEKLDNKNGKVYELSKDSYTLLMNNRTARRHQRRGIDRKQLVKRLFKLVWTEQLNLEWDKDTQQAISFLFNRRGFSFITDGYSTEYLNIVPEQVKAILMDIFDDYNGEDDLDSYLKLATEQESKISEIYNKLMQKILEFKLRKLCTDIKDDKVSTKTLKEITSYEFELLADYLANYSESLKIQKFSYTDKQGNLKELSYYHHDKYNIQEFLKRHATINDEILDTLLTDDFDIWNFNFEKFDFDKNEEKLQNQEDKDHTQAHLHHFVFAVNKIKSEMASGGRHRSQYFQEITNVLDENNHQEGYLKNFCENLHNKKYSNLSVKNLVNLVGNLSNLELKPLRKYFNDKIHAKADHWDEQKFTETYCHWILGEWRVGVKDQDKKDGAKYSYKDLCNELKQKVTKAGLIDFLLELDPCRTIPPYLDNNNRKPPKCQSLILNPKFLDNQYPNWQQYLQELKKLQSIQDYLDSFETDLKDLKSSKDQPYFVEYKSSNQQMASGQRDYKDLDARILQFIFDRVKASDELLLNEIYFQAKKLKQKASSELEKLESSKKLDEVIANSQLSQILKSQHTNGIFEQGTFLHLVCKYYKQRQRARDSRLYIMPEYRYDKKLDKYNNTGRFDDNNQLLTYCNHKPRQKRYQLLNDLAGVLQVSRNQLLSSVEEWFQQAQRVGEISKSQDEQIFEWLKSFKIASYCKAAVEMQKQYRGTLKNAIQTAIFRQSENINKNKNKNTGNQQQALSENSKDVKSLTADEKKLLKLIENIAKASQKIGESLGLNDKQIKKFNSIYSFAQIQQIAFAERKGNANTCAVCSADNAHRMQQIKITELVEDNKDNIILSAKAQRLPAIPTRIVDGAVKKMATILAKNIVDDNWQNIKQVLSAKHQLHIPIITESNAFEFEPALADVKGKSLKDRRKKALERISPENIFKDKNNRIKEFAKGISAYSGANLTDGDFDGAKEELDHIIPRSHKKYGTLNDEANLICVTRDDNKNIFAIDTSKWFEIETPSDLRDIGVATIQYKIDNNSRPKVRVKLDYVIDDDSKINYFMNHSLLKSRYPDKVLEILKQSTIIEFESSGFNKTIKEMLGMTLAGIYNETSNN

SEQ ID NO: 46 - protein, 1064 aa, Bradyrhizobium sp.
MKRTSLRAYRLGVDLGANSLGWFVVWLDDHGQPEGLGPGGVRIFPDGRNPQSKQSNAAGRRLARSARRRRDRYLQRRGKLMGLLVKHGLMPADEPARKRLECLDPYGLRAKALDEVLPLHHVGRALFHLNQRRGLFANRAIEQGDKDASAIKAAAGRLQTSMQACGARTLGEFLNRRHQLRATVRARSPVGGDVQARYEFYPTRAMVDAEFEAIWAAQAPHHPTMTAEAHDTIREAIFSQRAMKRPSIGKCSLDPATSQDDVDGFRCAWSHPLAQRFRIWQDVRNLAVVETGPTSSRLGKEDQDKVARALLQTDQLSFDEIRGLLGLPSDARFNLESDRRDHLKGDATGAILSARRHFGPAWHDRSLDRQIDIVALLESALDEAAIIASLGTTHSLDEAAAQRALSALLPDGYCRLGLRAIKRVLPLMEAGRTYAEAASAAGYDHALLPGGKLSPTGYLPYYGQWLQNDVVGSDDERDTNERRWGRLPNPTVHIGIGQLRRVVNELIRWHGPPAEITVELTRDLKLSPRRLAELEREQAENQRKNDKRTSLLRKLGLPASTHNLLKLRLWDEQGDVASECPYTGEAIGLERLVSDDVDIDHLIPFSISWDDSAANKVVCMRYANREKGNRTPFEAFGHRQGRPYDWADIAERAARLPRGKRWRFGPGARAQFEELGDFQARLLNETSWLARVAKQYLAAVTHPHRIHVLPGRLTALLRATWELNDLLPGSDDRAAKSRKDHRHHAIDALVAALTDQALLRRMANAHDDTRRKIEVLLPWPTFRIDLETRLKAMLVSHKPDHGLQARLHEDTAYGTVEHPETEDGANLVYRKTFVDISEKEIDRIRDRRLRDLVRAHVAGERQQGKTLKAAVLSFAQRRDIAGHPNGIRHVRLTKSIKPDYLVPIRDKAGRIYKSYNAGENAFVDILQAESGRWIARATTVFQANQANESHDAPAAQPIMRVFKGDMLRIDHAGAEKFVKIVRLSPSNNLLYLVEHHQAGVFQTRHDDPEDSFRWLFASFDKLREWNAELVRIDTLGQPWRRKRGLETGSEDATRIGWTRPKKWP

SEQ ID NO: 47 - protein, 1354 aa, Flavobacterium psychrophilum
MKKILGLDLGTNSIGWAFINEAENEIEVSSIVNTGVRIVPLTTDEESDFKKGNTISINADRTLKRGARRGLQRFKQRREALLETFNRIKFIATDFVYAETGAATTFSSYQLRAKSAVEAVTKEELVKVLLMLNKKRGYKSSRKAKTAEEGDAIDGMKIAKEIFENNLTPGQWVYNSLSKGGKFIPDFYHSDLQKELEKIVRFQNQFHSEQINDKLLADIQGKSRTQTSQHFSKTLNIPLAENKGTREETKLQHYQWRNEALANELDMKILAFIITEINNQINQSSGYLGAISDRSKELYFNQETVGQYQYKQLQENVHAKLKNQVFYRQDYLDEFEKIWETQAKFHSELNEKLKAEIRDITIFYQRKLKSQKHLVSFCEFEKGHKAIPKSSPLFQEFRIWQNLNNVVVKNETTKEVFELSEELKQLIAEELQFKESMTDVQMLTFCELKKGTHTVNFKKIEGNRTNTSIYKAFEKILEVEGYEIDFSKMKPLEIKETVAPIFETLNINTVILDFDPTIQGNDFDKQPYYQLWHLLYSAEDDDKLKETLKTKFGFKENHLPFILNINLQADYGSLSAKAIKKILPHLMDGHIYDKACLMVGYNHSSSLTTAQNNDRVLKDTLELLKKNSLRNPVVEKILNQMINVINAIMKDPAMGKPDEIRVELARELKANNEQRKKATSDINTATTEHERIRKLLHSEFNIPRVTRNDIIRYKLWLETGGISLYTGNPIKASDLFSKNYDIEHIIPKSRLFDDSFSNKTLCERQLNIDKSNKTAYSFLQEKLSENDFAAYENRVKDLFKTGKIKSYTKYKKLLMADNEIPEGFIDRQLRETQYIAKKAKEILLEVSRNVTATIGSVTDKLRQDWELVDVMKELNWEKYDKLGLTHIEEGKNGERLSKIKDWTKRNDHRHHAMDAITVAFTKPAYIQYLNNLNAKTQGENKANSIIGIENKHLYRDKNNKLRFISPMKNFREEAKKQLESILISYKAKNKVVTKNKNTTKKSGGTNQKIQLTPRGRLHKETVYGKLQQYATKEEKVNASFTEDYIQKVAKKEYREALLKRLEENDNDPKKAFTGKNALNKTPIYISLKDNIIVPEKVKTVWLETDYTIRKDITPDLKIDKVIDVGIKRILQNRLNEFNGDPKKAFVNLGESPIWLNKEKGIAIKRVTISGVSNAQALHTKKDHLGNEILDKNGNPIPVDFISTGNNHHVAIYRDEKGNLQEEVVSFYDAVIRRNLGLSVINKNHEKGWEFLFSMKQNEFFIFPSDGFNPHEIDLLNPNNYHLISPNIFRVQKISTKNYMFNHHLETKAVDGEMLKSKKELSKTSYHFIQTPTNLNGIIKVRINHLGKIVHLGEY

SEQ ID NO: 48 - protein, 1062 aa, Actinobacillus succinogenes
MNLNYILGLDLGIASVGWAVVEIDEQENPQRLIDVGVRTFDRAEVLKTGESLALARRLARSSRRLVKRRAERIKKAKRLLKAENLLLSADEILPNEAWQLRVKGLDQKLERQEWAAVLLHLLKHRGYLSQRKNESKSENKELGALLSGVAINHQILQSAEYRTPAEIAVNKFQAEEGHIRNQRGAYTHTFSRLDLLAEMELLFQRQATLGNPHTSTKLLENLTALLMWQKPALAGEAILKMLGKCTFEPTEYKAAKNSYSAERFVWLTKLNNLRILEQGAERALTDNERFALLDQPYEKAKLTYAQVRTLLGLSDEAIFKGLRYQGEDKKAVETKTTLMEVKAYHQIRKALEGLDLKAEWNELKNNPALLDEIGTAFSLYKTDDDIHRYLDGKLSESVLNALLENLNFDKFIQLSLKALQQILPLMLQGQRYDEAVSAIYGDHYGKKSDEIDRLLPNIPTDEIRNPVVLRTLTQARKVINAVVRLYGSPARIHIETGREVGKSYQDRKKLEKQQEENRKQRENAVKKFKEYFPNFVGEPKGKDILKMRLYELQQAKCLYSGKSLELYRLLEKGYVEVDHALPFSRTWDDSFNNKVLVLANENQNKGNATPYEWLDGKNNSEGWQHFVARVQTSGFSYAKKQRVLIQELDEKSFIERNLNDTRYVARFLCNHIADNMLLTGKGKRKVFASNGQITALLRGCWGLQKVRENNDRHHALDAVVVACSTKSMQDKITKFVKYKEGRLFKDKKDGVYKGERINRETGEIISLHFPTPWKFFKENVEIRIFSENPKLELENRLPDYPQYNHEFVQPLFVSRMPTRKMTGQGHMETVKSAKRLDKGLSVLKVPLTQLKLSDLERMVNREREMALYEALKECLEQFGNDPAKAFAEPFYKKGGALVKAVRVEQTQKSGVLVRNGNGVADNATGSIVRVDVFTKGGKYFLVPIYTWQVAKGILPNKAVIQGKDESEWEEMDENAVFQFSMHKNDLIKVKTKKGEIFGYFNGLDRATGSIEIEEHDLEKSKGKNGSHRGLGVKTAFFLEKYQVDELGKNIRPCRPTKRQHVR

SEQ ID NO: 49 - protein, 1340 aa, Dorea longicatena
MEQEYYLGLDMGTGSVGWAVTDSEYHVLRKHGKALWGVRLFESASTAEERRMFRTSRRRLDRRNWRIEILQEIFAEEISKKDPGFFLRMKESKYYPEDKRDINGNCPELPYALFVDDDFTDKDYHKKFPTIYHLRKMLMNTEETPDIRLVYLAIHHMMKHRGHFLLSGDINEIKEFGTTFSKLLENIKNEELDWNLELGKEEYAVVESILKDNMLNRSTKKTRLIKALKAKSICEKAVLNLLAGGTVKLSDIFGLEELNETERPKISFADNGYDDYIGEVENELGEQFYIIETAKAVYDWAVLVEILGKYTSISEAKVATYEKHKSDLQFLKKIVRKYLTKEEYKDIFVSTSDKLKNYSAYIGMTKINGKKVDLQSKRCSKEEFYDFIKKNVLKKLEGQPEYEYLKEELERETFLPKQVNRDNGVIPYQIHLYELKKILGNLRDKIDLIKENEDKLVQLFEFRIPYYVGPLNKIDDGKEGKFTWAVRKSNEKIYPWNFENVVDIEASAEKFIRRMTNKCTYLMGEDVLPKDSLLYSKYMVLNELNNVKLDGEKLSVELKQRLYTDVFCKYRKVTVKKIKNYLKCEGIISGNVEITGIDGDFKASLTAYHDFKEILTGTELAKKDKENIITNIVLFGDDKKLLKKRLNRLYPQITPNQLKKICALSYTGWGRFSKKFLEEITAPDPETGEVWNIITALWESNNNLMQLLSNEYRFMEEVETYNMGKQTKTLSYETVENMYVSPSVKRQIWQTLKIVKELEKVMKESPKRVFIEMAREKQESKRTESRKKQLIDLYKACKNEEKDWVKELGDQEEQKLRSDKLYLYYTQKGRCMYSGEVIELKDLWDNTKYDIDHIYPQSKTMDDSLNNRVLVKKKYNATKSDKYPLNENIRHERKGFWKSLLDGGFISKEKYERLIRNTELSPEELAGFIERQIVETRQSTKAVAEILKQVFPESEIVYVKAGTVSRFRKDFELLKVREVNDLHHAKDAYLNIVVGNSYYVKFTKNASWFIKENPGRTYNLKKMFTSGWNIERNGEVAWEVGKKGTIVTVKQIMNKNNILVTRQVHEAKGGLFDQQIMKKGKGQIAIKETDERLASIEKYGGYNKAAGAYFMLVESKDKKGKTIRTIEFIPLYLKNKIESDESIALNFLEKGRGLKEPKILLKKIKIDTLFDVDGFKMWLSGRTGDRLLFKCANQLILDEKIIVTMKKIVKFIQRRQENRELKLSDKDGIDNEVLMEIYNTFVDKLENTVYRIRLSEQAKTLIDKQKEFERLSLEDKSSTLFEILHIFQCQSSAANLKMIGGPGKAGILVMNNNISKCNKISIINQSPTGIFENEIDLLKI

SEQ ID NO: 50 - protein, 984 aa, Campylobacter jejuni
MAKILAFDIGISSIGWAFSENDELKDCGVRIFTKAENPKTGESLALPRRIARSARKRLARRKARLNHLKHLIANEFKLNYEDYQSFDEILAKAYKGSLISPYELRFRALNELLSKQDFARVILHIAKRRGYDDIKNNGDEEKGKILKAIKQNEEKLANYQSVGEYLYKEYFQKFKENSKEFINVRNKKESYERCIAQSFLKDELKLIFKKQREFGFSFSKKFEEEVLSVAFYKRALKDFSHLVGNCSFFTDEKRAPKNSPLAFMFVALTRIINLLNNLKNTLYTKDDLNALLNEVLKNGTLTYKQTKKLLGLSDDYEFKGEKGNYFIEFKKYKEFIKALGEHSLSQDDLNEIAKDITLIKDEIKLKKALAKYDLNENQIDNLSKLEFKDHLNISFKALKLITPLMLEGKKYDEACNELTLKVAINEDKKDFLPAFNETYYKDEVTNPVVLRAIKEYRKVLNALLKKYGKVHKINIELAREVGKNHSQRAKIEKEQNENYKAKKDAELECEKLGLKINSKNILKLRLFKEQKEFCVYSGEKIKLSDLQDEKMLEIDHIYPYSRSFDDSYMNKVLVFTKQNQEKLNQTPFEAFGNDSAKWQKIEVLAKNLPTKKQKRILDKNYKDKEQKDFKDRNLNDTRYIARLVLNYTKDYLDFLPLSDDENTKLNDTQKGSKVHVEAKSGMLTSALRHTWGFSTKDRNNHLHHAIDAVIIAYANNSIVKAFSDFKKEQESNTAELYAKKISELDYKNKRKFFEPFSGFRQKVLDKIDEIFVSKPERKKPSGALHEETFRKEEEFYQSYGGKEGVLKALELGKIRKVNGKIVKNGDMFRVDIFKHKKTNKFYAVPIYTMDFALKVLPNKAVARSKKGEIKDWILMDENYEFCFSLYKDSLILIQTKDMQEPEFVYYNAFTSSTVSLIVSKHDNKFETLSKNQKILFKNANEKEVIAKSIGIQNLKVFEKYIVSALGEVTKAEFRQREEFKNELR

SEQ ID NO: 51 - protein, 1037 aa, Parvibaculum lavamentivorans
MERIFGFDIGTTSIGFSVIDYSSTQSAGNIQRLGVRIFPEARDPDGTPLNQQRRQKRMMRRQLRRRRIRRKALNETLHEAGFLPAYGSADWPVVMADEPYELRRRGLEEGLSAYEFGRAIYHLAQHRHFKGRELEESDTPDPDVDDEKEAANERAATLKALKNEQTTLGAWLARRPPSDRKRGIHAHRNVVAEEFERLWEVQSKFHPALKSEEMRARISDTIFAQRPVFWRKNTLGECRFMPGEPLCPKGSWLSQQRRMLEKLNNLAIAGGNARPLDAEERDAILSKLQQQASMSWPGVRSALKALYKQRGEPGAEKSLKFNLELGGESKLLGNALEAKLADMFGPDWPAHPRKQEIRHAVHERLWAADYGETPDKKRVIILSEKDRKAHREAAANSFVADFGITGEQAAQLQALKLPTGWEPYSIPALNLFLAELEKGERFGALVNGPDWEGWRRTNFPHRNQPTGEILDKLPSPASKEERERISQLRNPTVVRTQNELRKVVNNLIGLYGKPDRIRIEVGRDVGKSKREREEIQSGIRRNEKQRKKATEDLIKNGIANPSRDDVEKWILWKEGQERCPYTGDQIGFNALFREGRYEVEHIWPRSRSFDNSPRNKTLCRKDVNIEKGNRMPFEAFGHDEDRWSAIQIRLQGMVSAKGGTGMSPGKVKRFLAKTMPEDFAARQLNDTRYAAKQILAQLKRLWPDMGPEAPVKVEAVTGQVTAQLRKLWTLNNILADDGEKTRADHRHHAIDALTVACTHPGMTNKLSRYWQLRDDPRAEKPALTPPWDTIRADAEKAVSEIVVSHRVRKKVSGPLHKETTYGDTGTDIKTKSGTYRQFVTRKKIESLSKGELDEIRDPRIKEIVAAHVAGRGGDPKKAFPPYPCVSPGGPEIRKVRLTSKQQLNLMAQTGNGYADLGSNHHIAIYRLPDGKADFEIVSLFDASRRLAQRNPIVQRTRADGASFVMSLAAGEAIMIPEGSKKGIWIVQGVWASGQVVLERDTDADHSTTTRPMPNPILKDDAKKVSIDPIGRVRPSND

SEQ ID NO: 52 - protein, 1107 aa, Eubacterium ventriosum
MGYTVGLDIGVASVGVAVLDENDNIVEAVSNIFDEADTSNNKVRRTLREGRRTKRRQKTRIEDFKQLWETSGYIIPHKLHLNIIELRNKGLTELLSLDELYCVLLSMLKHRGISYLEDADDGEKGNAYKKGLAFNEKQLKEKMPCEIQLERMKKYGKYHGEFIIEINDEKEYQSNVFTTKAYKKELEKIFETQRCNGNKINTKFIKKYMEIYERKREYYIGPGNEKSRTDYGIYTTRTDEEGNFIDEKNIFGKLIGKCSVYPEEYRASSASYTAQEFNLLNDLNNLKINNEKLTEFQKKEIVEIIKDASSVNMRKIIKKVIDEDIEQYSGARIDKKGKEIYHTFEIYRKLKKELKTINVDIDSFTREELDKTMDILTLNTERESIVKAFDEQKFVYEENLIKKLIEFRKNNQRLFSGWHSFSYKAMLQLIPVMYKEPKEQMQLLTEMNVFKSKKEKYVNYKYIPENEVVKEIYNPVVVKSIRTTVKILNALIKKYGYPESVVIEMPRDKNSDDEKEKIDMNQKKNQEEYEKILNKIYDEKGIEITNKDYKKQKKLVLKLKLWNEQEGLCLYSGKKIAIEDLLNHPEFFEIDHIIPKSISLDDSRSNKVLVYKTENSIKENDTPYHYLTRINGKWGFDEYKANVLELRRRGKIDDKKVNNLLCMEDITKIDVVKGFINRNLNDTRYASRVVLNEMQSFFESRKYCNTKVKVIRGSLTYQMRQDLHLKKNREESYSHHAVDAMLIAFSQKGYEAYRKIQKDCYDFETGEILDKEKWNKYIDDDEFDDILYKERMNEIRKKIIEAEEKVKYNYKIDKKCNRGLCNQTIYGTREKDGKIHKISSYNIYDDKECNSLKKMINSGKGSDLLMYNNDPKTYRDMLKILETYSSEKNPFVAYNKETGDYFRKYSKNHNGPKVEKVKYYSGQINSCIDISHKYGHAKNSKKVVLVSLNPYRTDVYYDNDTGKYYLVGVKYNHIKCVGNKYVIDSETYNELLRKEGVLNSDENLEDLNSKNITYKFSLYKNDIIQYEKGGEYYTERFLSRIKEQKNLIETKPINKPNFQRKNKKGEWENTRNQIALAKTKYVGKLVTDVLGNCYIVNMEKFSLVVDK

SEQ ID NO: 53 - protein, 1136 aa, Streptococcus gordonii
MNGLVLGLDIGIASVGVGILEKDTGKIIHASSRLFPAATADNNVERRSNRQGRRLNRRKKHRSVRLQDLFEGYGLLTDFSKVSMNLNPYQLRVQGMENQLTNEELFVALKNIVKRRGISYLDDASEDGGTVSSDYGKAVEENRKLLAEKTPGQIQLERFEKYGQLRGDFTVEENGEKHRLINVFSTSAYRKEAERILRKQQEFNSKITDEFIEDYLIILTGKRKYYHGPGNEKSRTDYGRFRTDGTTLDNIFGILIGKCTFYTEEYRASKASYTAQEFNLLNDLNNLTVPTETKKLSEEQKKLIIEYAKSAKTLGASTLLKYIAKMIDASVDQIRGYRVDVNNKPEMHTFEVYRKMQSLETIKVEELPRKVLDELAHILTLNTEREGIEEAINSKLKDIFNRDQVLELVQFRKNNSSLFSKGWHNFSIKLMMELIPELYETSEEQMTILTRLGKQRSKETSKRTKYIDEKELTEEIYNPVVAKSVRQAIKIINEATKKYGIFDNIVIEMARENNEEDAKKDYIKRQKANQDEKNAAMEKAAFQYNGKKELPDNIFHGHKELTTKIRLWHQQGEKCLYTGKNIPISDLIHNQYKYEIDHILPLSLSFDDSLSNKVLVLATANQEKGQRTPFQALDSMDDAWSYREFKSYVKDSKLLSNKKKDYLLTEEDISKIEVKQKFIERNLVDTRYSSRVVLNALQDFYKSHQLDTTISVVRGQFTSQLRRKWGIEKSRETYHHHAVDALIIAASSQLRLWKKHSNPLIAYKEGQFVDSETGEIVSLSDEEYKELVFKAPYDHFVDTLRSKKFEDSILFSYQVDSKYNRKISDATIYATRKAKLDKEKKEYTYTLGKIKDIYALGTKTPSKTGFYKFLDLYKTDKSQFLMYQKDRKTWDEVIEKIIEQYRPFKEYDKNGKEVDFNPFEKYRIGNGPIRKYSKKGNGPEIKSLKYYDILLGKHKNITPDGSRNTVALLSLNPWRTDVYYNSETKKYEFLGLKYADLCFEEGGAYGISEVKYKKIREKEGIGKNSEFKFTLYKNDLILIKDTETNCQQFFRFWSRTGKDNPKSFEKHKIELKPYEKAKFEKGEELKVLGKVPPSSNQFQKNMQIENLSIYKVKTDILGNKHFIKKEGDEPKLKFKK

SEQ ID NO: 54 - protein, 984 aa, Campylobacter jejuni
MARILAFDIGISSIGWAFSENDELKDCGVRIFTKAENPKTGESLALPRRLARSARKRLARRKARLNHLKHLIANEFKLNYEDYQSFDESLAKAYKGSLISPYELRFRALNELLSKQDFARVILHIAKRRGYDDIKNNGDEEKSEILKAIKQNEEKLVNYQSVGEYLYKEYFQKFKENSKEFINVRNKKESYERCITQSFLKDELKLIFQKQREFGFSFSKKFEEEVLSVAFYKRALKDFSHLVGNCSFFTDEKRAPKNSPLAFMFVALTRIINILNNLKNTEGILYTKDDLNALLNEVLKNGTLTYKQTKKLLGLSDDYEFKGEKGTYFIEFKKYKEFIKALGEHNLSQDDLNEIAKDITLIKDEIKLKKALAKYDLNQNQIDSLSKLEFKDHLNISFKALKLITPLMLEGKKYDEACNELNLKVAINEDKKDFLPAFNETYYKDEVTNPVVLRAIKEYRKILNALLKKYGKVHKINIELAREVGKNHSQRAKIEKEQNENYKAKKDAEIECEKLGLKINSKNILKLRLFKEQKEFCAYSGEKIKLSDLQDEKMLEIDHIYPYSRSFDDSYMNKVLVFTKQNQEKLNKTPFEAFGNDSTKWQKIEVLAKNLPEKKQKRILDKNYKDKEQKDFKDRNLNDTRYIARLVLNYTKDYLDFLPLSDDENTKLNDTQKGSKVHVEAKSGMLTSALRHTWGFSAKDRNNHLHHAIDAAIIAYANNSIVKAFSDFKKEQESNSVELYAKKISELDYKNKRKFFEPFSGFRQKVLDKIDEIFVSKPERKKPSGALHEETFRKEEEFYQSYGGKEGVLKALELGKIRKVNGKIVKNGDMFRVDIFKHKKTNKFYAVPIYTMDFALKVLPNKAVARSKKGEIKDWILMDENYEFCFSLYKDSLILIQTKDMQEPELVYFNAFTSSTVSLIVSKHDNKFETLSKNQKILFKNANEKEVIAKSIGIQNLKVFEKYIVSALGEVTKAEFRQREDFKK

SEQ ID NO: 55 - protein, 1079 aa, Dinoroseobacter shibae
MRLGLDIGTSSIGWWLYETDGAGSDARITGVVDGGVRIFSDGRDPKSGASLAVDRRAARAMRRRRDRYLRRRATLMKVLAETGLMPADPAEAKALEALDPFALRAAGLDEPLPLPHLGRALFHLNQRRGFKSNRKTDRGDNESGKIKDATARLDMEMMANGARTYGEFLHKRRQKATDPRHVPSVRTRLSIANRGGPDGKEEAGYDFYPDRRHLEEEFHKLWAAQGAHHPELTETLRDLLFEKIFFQRPLKEPEVGLCLFSGHHGVPPKDPRLPKAHPLTQRRVLYETVNQLRVTADGREARPLTREERDQVIHALDNKKPTKSLSSMVLKLPALAKVLKLRDGERFTLETGVRDAIACDPLRASPAHPDRFGPRWSILDADAQWEVISRIRRVQSDAEHAALVDWLTEAHGLDRAHAEATAHAPLPDGYGRLGLTATTRILYQLTADVVTYADAVKACGWHHSDGRTGECFDRLPYYGEVLERHVIPGSYHPDDDDITRFGRITNPTVHIGLNQLRRLVNRIIETHGKPHQIVVELARDLKKSEEQKRADIKRIRDTTEAAKKRSEKLEELEIEDNGRNRMLLRLWEDLNPDDAMRRFCPYTGTRISAAMIFDGSCDVDHILPYSRTLDDSFPNRTLCLREANRQKRNQTPWQAWGDTPHWHAIAANLKNLPENKRWRFAPDAMTRFEGENGFLDRALKDTQYLARISRSYLDTLFTKGGHVWVVPGRFTEMLRRHWGLNSLLSDAGRGAVKAKNRTDHRHHAIDAAVIAATDPGLLNRISRAAGQGEAAGQSAELIARDTPPPWEGFRDDLRVRLDRIIVSHRADHGRIDHAARKQGRDSTAGQLHQETAYSIVDDIHVASRTDLLSLKPAQLLDEPGRSGQVRDPQLRKALRVATGGKTGKDFENALRYFASKPGPYQAIRRVRIIKPLQAQARVPVPAQDPIKAYQGGSNHLFEIWRLPDGEIEAQVITSFEAHTLEGEKRPHPAAKRLLRVHKGDMVALERDGRRVVGHVQKMDIANGLFIVPHNEANADTRNNDKSDPFKWIQIGARPAIASGIRRVSVDEIGRLRDGGTRPI

SEQ ID NO: 56 - protein, 1096 aa, Eubacterium dolichum
MMEVFMGRLVLGLDIGITSVGFGIIDLDESEIVDYGVRLFKEGTAAENETRRTKRGGRRLKRRRVTRREDMLHLLKQAGIISTSFHPLNNPYDVRVKGLNERLNGEELATALLHLCKHRGSSVETIEDDEAKAKEAGETKKVLSMNDQLLKSGKYVCEIQKERLRTNGHIRGHENNFKTRAYVDEAFQILSHQDLSNELKSAIITIISRKRMYYDGPGGPLSPTPYGRYTYFGQKEPIDLIEKMRGKCSLFPNEPRAPKLAYSAELFNLLNDLNNLSIEGEKLTSEQKAMILKIVHEKGKITPKQLAKEVGVSLEQIRGFRIDTKGSPLLSELTGYKMIREVLEKSNDEHLEDHVFYDEIAEILTKTKDIEGRKKQISELSSDLNEESVHQLAGLTKFTAYHSLSFKALRLINEEMLKTELNQMQSITLFGLKQNNELSVKGMKNIQADDTAILSPVAKRAQRETFKVVNRLREIYGEFDSIVVEMAREKNSEEQRKAIRERQKFFEMRNKQVADIIGDDRKINAKLREKLVLYQEQDGKTAYSLEPIDLKLLIDDPNAYEVDHIIPISISLDDSITNKVLVTHRENQEKGNLTPISAFVKGRFTKGSLAQYKAYCLKLKEKNIKTNKGYRKKVEQYLLNENDIYKYDIQKEFINRNLVDTSYASRVVLNTLTTYFKQNEIPTKVFTVKGSLTNAFRRKINLKKDRDEDYGHHAIDALIIASMPKMRLLSTIFSRYKIEDIYDESTGEVFSSGDDSMYYDDRYFAFIASLKAIKVRKFSHKIDTKPNRSVADETIYSTRVIDGKEKVVKKYKDIYDPKFTALAEDILNNAYQEKYLMALHDPQTFDQIVKVVNYYFEEMSKSEKYFTKDKKGRIKISGMNPLSLYRDEHGMLKKYSKKGDGPAITQMKYFDGVLGNHIDISAHYQVRDKKVVLQQISPYRTDFYYSKENGYKFVTIRYKDVRWSEKKKKYVIDQQDYAMKKAEKKIDDTYEFQFSMHRDELIGITKAEGEALIYPDETWHNFNFFFHAGETPEILKFTATNNDKSNKIEVKPIHCYCKMRLMPTISKKIVRIDKYATDVVGNLYKVKKNTLKFEFD

SEQ ID NO: 57 - protein, 1082 aa, Neisseria meningitidis
MAAFKPNPINYILGLDIGIASVGWAMVEIDEDENPICLIDLGVRVFERAEVPKTGDSLAMARRLARSVRRLTRRRAHRLLRARRLLKREGVLQAADFDENGLIKSLPNTPWQLRAAALDRKLTPLEWSAVLLHLIKHRGYLSQRKNEGETADKELGALLKGVADNAHALQTGDFRTPAELALNKFEKESGHIRNQRGDYSHTFSRKDLQAELNLLFEKQKEFGNPHISDGLKEGIETLLMTQRPALSGDAVQKMLGHCTFEPAEPKAAKNTYTAERFIWLTKLNNLRILEQGSERPLTDTERTTLIDEPYRKSKLTYAQARKLLELDNTAFFKGLRYGKDNAEASTLMEMKAYHAISRALEKEGLKDKKSPLNLSPELQDEIGTAFSLFKTDEDITGRLKDRVQPEILEALLKHISFDKFVQISLKALRRIVPLMEQGKRYDEACAEIYGDHYGKKNTEEKIDLPPIPADEIRNPVVLRALSQARKVINGVVRRYGSPARIHIETAREVGKSFKDRKEIEKRQEENRKDREKAATKFREYFPNFVGEPKSKDILKLRLYEQQHGKCLYSGKEINLGRLNEKGYVEIDHALPFSRTWDDSFNNKVLVLGSENQNKGNQTPYEYFNGKDNSREWQEFKARVETSRFPRSKKQRILLQKFDEEGFKERNLNDTRYVNRFLCQFVADHMLLTGKGKRRVFASNGQITNLLRGFWGLRKVRAENDRHHALDAVVVACSTVAMQQKITRFVRYKEMNAFDGKTIDKETGEVLHQKTHFPQPWEFFAQEVMIRVFGKPDGKPEFEEADTPEKLRTLLAEKLSSRPEAVHEYVTPLFVSRAPNRKMSGQGHMETVKSAKRLDEGVSVLRVPLTQLKLKDLEKMVNREREPKLYEALKARLEAHKDDPAKAFAEPFYKYDKAGNRTQQVKAVRVEQVQKTGVWVRNHNGIADNATMVRVDVFEKGDKYYLVPIYSWQVAKGILPDRAVVQGKDEEDWQLIDDSFNFKFSLHPNDLVEVITKKARMFGYFASCHRGTGNINIRIHDLDHKIGKNGILEGIGVKTALSFQKYQIDELGKEIRPCRLKKRPPVR

SEQ ID NO: 58 - protein, 1050 aa, Gluconacetobacter diazotrophicus
MGENMIDESLTFGIDLGIGSCGWAVLRRPSAFGRKGVIEGMGSWCFDVPETSKERTPTNQIRRSNRLLRRVIRRRRNRMAAIRRLLHAAGLLPSTDSDALKRPGHDPWELRARGLDKPLKPVEFAVVLGHIAKRRGFKSAAKRKATNISSDDKKMLTALEATRERLGRYRTVGEMFARDPDFASRRRNREGKYDRTTARDDLEHEVHALFAAQRRLGQGFASPELEEAFTASAFHQRPMQDSERLVGFCPFERTEKRAAKLTPSFERFRLLARLLNLRITTPDGERPLTVDEIALVTRDLGKTAKLSIKRVRTLIGLEDNQRFTTIRPEDEDRDIVARTGGAMTGTATLRKALGEALWTDMQERPEQLDAIVQVLSFFEANETITEKLREIGLTLAVLDVLLTALDAGVFAKFKGAAHISTKAARNLLPHLEQGRRYDEACTMAGYDHAASRLSHHGQIVAKTQFNALVTEIGESIANPIARKALIEGLKQIWAMRNHWGLPGSIHVELARDVGNSIEKRREIEKHIEKNTALRARERREVHDLLDLEDVNGDTLLRYRLWKEQGGKCLYTGKAIHIRQIAATDNSVQVDHILPWSRFGDDSFNNKTLCLASANQQKKRSTPYEWLSGQTGDAWNAFVQRIETNKELRGFKKRNYLLKNAKEAEEKFRSRNLNDTRYAARLFAEAVKLLYAFGERQEKGGNRRVFTRPGALTAALRQAWGVESLKKQDGKRINDDRHHALDALTVAAVDEAEIQRLTKSFHEWEQQGLGRPLRRVEPPWESFRADVEATYPEVFVARPERRRARGEGHAATIRQVKERECTPIVFERKAVSSLKEADLERIKDGERNEAIVEAIRSWIATGRPADAPPRSPRGDIITKIRLATTIKAAVPVRGGTAGRGEMVRADVFSKPNRRGKDEWYLVPVYPHQIMNRKAWPKPPMRSIVANKDEDEWTEVGPEHQFRFSLYPRSNIEIIRPSGEVIEGYFVGLHRNTGALTISAHNDPKSIHSGIGTKTLLAISKYQVDRFGRKSPVRKEVRTWHGEACISPTPPG

SEQ ID NO: 59 - protein, 1391 aa, Kordia algicida
MKKILGLDLGTNSIGWALVNEAEHEHEQSSIVKLGVRVNPLSVDEKTNFEKGRPLSINADRTSKRSARRNLQRFKLRRKNLINLLLKHHIISNETILTEVGKNTTHQTLKLRSKATQEKISLEEFARILLSINKKRGYKSSRKEKNEDEGFTIDGMAIAKELYDNQLTPGQYVYNILQDGKNYIPDFYRSDLQAEFDDVWQFQKKFYSSILTDEFYLKLKGQGKENTRKLFLAIHQVYTAENKGKRDAVKLQYYKWRSEAVKKQLSIEEVAYVLVEINNNINKSSGYLGAISDRSKALYFNNETVGEYLYGQLVKNRHNSLRNQVFYRQDYLDEFEKIWETQAKFYDELTNELKQEIRDVVIFYQRKLKSQKHLISDCLFEKHHKAIPKSSPLFQEFKIWQNLNYLEFVHTQSKEKIFFSELDDETRQFVFAELNIRGTLKIKEIKKLIGLETPVYWKSNFDEIEGNRTNQVLYNVYQNIADDLGYGFDWSKKHAFEINAELQAIFKDVGIDTAILNFDASIEENDFDKQKSYQLWHLLYSAEDTDKATEEDKLIYGNINTKLKKQLHQKYGFEAKYGNLLANISLQQDYGNLSAKAIKKILPYLESGNSFYEACTIVGYNPSNSLTKEQQQNRKLKDKLELLPKNSLRNPVVEKILNQKVNLINQLIDEYGKPDEVRIELARELKKSAKQRADLSKHINDATLKNQNIRKTLQKDFGIQNPSKNDVIRYKLYDELKDNGYKTLFTNKYIPKEQLFSKDVDIEHIIPKAILFDDSFSNKTLAYRNVNLAKADATAFDFISSKHLDDLDNYKARVETLFQSKRISKGKYKKLLMTRQNLPEDFIERDLRNSQYIAKKATAMLKEVFRSVVPTSGRITDKLREDWDLVNVMKELNLPKYRTLGLTEFIERKNGNKIEQIIDWTKRNDHRHHAMDALTVAFTTHNHIQYLNNLNVTHGLNGVDTDHEKSRLYAIKQAITKVYIVGKTKKRKFIPPMENFRSHAKNHLEGILISFKNKNKVVTKNKNRTKTKTKGVFNEKIQLTPRGQLHKETIYGHAKKVIVTKEKVSSKFTHEKILQVTKPAYREALLKRLASFKNDPKKAFSGKNALSKNPLYFDITSGKKVPDTVKLSYFENSYVIRKEVNSDNFKNEKSLQKVLDVGIRRILEKRLADYNGNAKEAFSNLEKNPIWKDKEKGVCIKKVRIEALKNAEPLHVKKDHLGKIILDDENKSTPVDFISTGNNHHVAIYEDKDGKLHDKVVSFYEVVSRVNLGLPIIDKSFNSHLDWKFLFSMKQNEMFVFPSEDFNPKEIDIGNPKNNELISKYLFRVQKFSKVTYGNSAVRDYVFRHHLETELIDKKELKGITYYQLKSIGMLEKLVKVRINHIGKIVHIGEY

SEQ ID NO: 60 - protein, 1116 aa, Clostridium spiroforme
MVEFLLKEMKIMGRLVLGLDIGITSVGYGVIDIDKNEFVDYGVRLFKEGTAINNEERRSKRGARRLKRRKTNRIADMKKLLERNGLIDEQYTALNNPYEIRKKGLKNKLSNYELATAILHITKNRGTCLESNADETQDEESTKNILSKNALELKDKYICEIQLARLEESGKIRGINNNFKTEDYLKELSKILENQDLEKETIDKIKEIVARRRRYDQGPGSEKSPTPYGSYRMENGELVHVNLIDMMRGKCSVFPDQLRAPQQSYSAELFNLLNDLNNLKINGEKLSSTEKQKIIDFVNEKGGITVKQLLKLIDVGITEISGFRIDKNEKPLITEFKGYKKVLKVFKNYNQESLLNDKSIVDTIMDINTKIKSIDERSDQLKQVLPSLDTSIINDLASIKGVSGYHSLSLKALNLINNEMLKTEMNQMQVLHQLDIFDKNRVSLKGQRQIYADDNAILSPVAKRAHRETFKVINKLRSIYGEFDSIVIETTRDKNTQDQKKRIKNNQKNYEERNTEVNNFLKEAGYNPENINAKTKMKIRLYIEQDAKSAYTLQDINLKELIEDEKAYEIDHIIPISISLDDSFNNKVLTTHDENQEKGNLTPISAFLKGKFHNGNLNTYKVFIQNNKNLNRKKKEYLLCEDDITRYEVVQNFINRNLVDTSYACRTVMNTLVHYFKDNEINTKVHTIKGQATSTFRKRIGLIKDREEDYFHHAIDALIVASLKKMNLINSYLMKVDFNEMYDEETGEIFNVLPDNSYLDEKYISFVSNLKNIYEESNKYIRGVMIKEKMTYPLIKVSHKIDTKPNRKISDDTIYSTRNVDNQDMLVERIKNIYDPKENAANTLINDIINDNTDKYIMYHKDPQTFDKIKAIVLNHFNEFKTDKNCYIVTKEGLYKLKGTSPLALYYEEFGPITKYAKKNNGPTIHSMKFYSEKLGNHLSITHKYSTVNKKVITKQISPYRTDFYQSPEGKYKFVTVRYKDVAYNAKKDKYIIDHSWYREQKKLKKIADEWIFVCSVHRDELIGIMKADGQKRIFDSSTESDGETLYHDAKTYEILKFTATNNDITGRFEVKPIYCYCKKQLMVSIGTCRKIQKFATDVLGNLYIVKDNVLKLEFK

SEQ ID NO: 61 - protein, 1348 aa, Finegoldia magna
MKSEKKYYIGLDVGTNSVGWAVTDEFYNILRAKGKDLWGVRLFEKADTAANTRIFRSGRRRNDRKGMRLQILREIFEDEIKKVDKDFYDRLDESKFWAEDKKVSGKYSLFNDKNFSDKQYFEKFPTIFHLRKYLMEEHGKVDIRYYFLAINQMMKRRGHFLIDGQISHVTDDKPLKEQLILLINDLLKIELEEELMDSIFEILADVNEKRTDKKNNLKELIKGQDFNKQEGNILNSIFESIVTGKAKIKNIISDEDILEKIKEDNKEDFVLTGDSYEENLQYFEEVLQENITLFNTLKSTYDFLILQSILKGKSTLSDAQVERYDEHKKDLEILKKVIKKYDEDGKLFKQVFKEDNGNGYVSYIGYYLNKNKKITAKKKISNIEFTKYVKGILEKQCDCEDEDVKYLLGKIEQENFLLKQISSINSVIPHQIHLFELDKILENLAKNYPSFNNKKEEFTKIEKIRKTFTFRIPYYVGPLNDYHKNNGGNAWIFRNKGEKIRPWNFEKIVDLHKSEEEFIKRMLNQCTYLPEETVLPKSSILYSEYMVLNELNNLRINGKPLDTDVKLKLIEELFKKKTKVTLKSIRDYMVRNNFADKEDFDNSEKNLEIASNMKSYIDFNNILEDKFDVEMVEDLIEKITIHTGNKKLLKKYIEETYPDLSSSQIQKIINLKYKDWGRLSRKLLDGIKGTKKETEKTDTVINFLRNSSDNLMQIIGSQNYSFNEYIDKLRKKYIPQEISYEVVENLYVSPSVKKMIWQVIRVTEEITKVMGYDPDKIFIEMAKSEEEKKTTISRKNKLLDLYKAIKKDERDSQYEKLLTGLNKLDDSDLRSRKLYLYYTQMGRDMYTGEKIDLDKLFDSTHYDKDHIIPQSMKKDDSIINNLVLVNKNANQTTKGNIYPVPSSIRNNPKIYNYWKYLMEKEFISKEKYNRLIRNTPLTNEELGGFINRQLVETRQSTKAIKELFEKFYQKSKIIPVKASLASDLRKDMNTLKSREVNDLHHAHDAFLNIVAGDVWNREFTSNPINYVKENREGDKVKYSLSKDFTRPRKSKGKVIWTPEKGRKLIVDTLNKPSVLISNESHVKKGELFNATIAGKKDYKKGKIYLPLKKDDRLQDVSKYGGYKAINGAFFFLVEHTKSKKRIRSIELFPLHLLSKFYEDKNTVLDYAINVLQLQDPKIIIDKINYRTEIIIDNFSYLISTKSNDGSITVKPNEQMYWRVDEISNLKKIENKYKKDAILTEEDRKIMESYIDKIYQQFKAGKYKNRRTTDTIIEKYEIIDLDTLDNKQLYQLLVAFISLSYKTSNNAVDFTVIGLGTECGKPRITNLPDNTYLVYKSITGIYEKRIRIK

SEQ ID NO: 62 - protein, 1129 aa, Streptococcus infantarius
MSNGKILGLDIGVASVGVGIIDSKTGNVIHANSRLFSAANAENNAERRGFRGARRLTRRKKHRVKRVRDLFEKYDISTDFRNLNLNPYELRVKGLTEQLTNEELFAALRTIAKRRGISYLDDAEDDSTGSSDYAKSIDENRRLLKTKTPGQIQLERLEKYGQLRGNFTVYDENGEAHRLINVFSTSDYKNEARKILETQSNYNKQITDEFIEDYIEILTQKRKYYHGPGNEKSRTDYGRFRTDGTTLENIFGILIGKCSFYPEEYRASKASYTAQEFNFLNDLNNLKVPTETGKLSTEQKEYLVDFAKKSKALGASKLLKEIAKIVDCSVDDIKGYRVDNKDKPDLHTFEPYRKLKFNLSSIDIDELSRETLDKLADILTLNTEREGIEDAIKRNLPSQFTEEQISEIVQIRKNQSSAFNKGWHSFSAKLMNELIPELYVTSEEQMTILTRLEKFKVNKKSSKNTKTIDEKEITDEIYNPVVAKSVRQTIKIINAAVKKYGDFDKIVIEMPRDKNAEDEKKFIDKKQKENKKEKDDSLKRAAFLYNGTDNLPDGVFHGNKELKTKIRLWYQQGERCLYSGKLISIHDLVHNSNKFEIDHILPLSLSFDDSLANKVLVYAWTNQEKGQKTPYQVIDSMDTAWSFREMKDYVLKQKGLGKKKCEYLLTTENIDKIEVKKKFIERNLVDTRYASRVVLNSLQTALKELGKDTKVSVVRGQFTSQLRRKWNIDKSRETYHHHAVDALIIAASSQLKLWQKQENPMFESYGENQVVNKETGEILSISDDKYKELVFQPPYQGFVNTISSKGFEDEILFSYQVDSKFNRKVSDATIYSTRKAKLGKDKKDETYVLGKIKDIYSQDGFDTFIKRYKKDKTQFLMYQKDPLTWENVIEVILRDYPSEKLSEDGKKTVKCNPFEEYRRENGLICKYSKKGNGTPIKSLKYYDKKLGNCIDITPEKSKNRVVLRQISPWRADIYFNLETLKYELMGLKYSDLSFEKGTGKYHISQEKYDAIREKEGIGKKSEFKFTLYRNDLILIKDTLNNCERMLRFGSKNDTSKHYVELKPLEKGTFDSEEEILPVLGKVAKSGQFIKGLNKPNISIYKVRTDVLGNKFFIKKEGDKPKLDFKNNNK

SEQ ID NO: 63 - protein, 1065 aa, Clostridium perfringens
MNKDINYALGLDIGITSVGWAVINLDLNRIEDLGVRIFNAAENLKDGSSLALPRRLARGRRRLLRRKAYRVERVRKLILKNNILTKEELEGLFKNKEVIDVWEARVKGLDYKLSREEWAKILINFCKRRGFKSNRKNEAKDKEAGQILSSISYNIEKMKETNSRTIGEYIYNEVKNSEDSYAPLRNKFGEYKMCVSRDVIREEIHTLFEKQRELGNNFASDEIEDKYFEIFNSQRPFSNFEDLEKLVGFCTFERKKHKRAPKHCISSEEFTLYEGINKLSIIKDGEKRKLSEEERTLVVNEAFNKKEIKYTTLRKLLGLSEEELFSTLTYSIDKDISKTENTKFVSLKGYHEIKRAIEKGVSKKAWQDIENNRNLLNDIAYVLTLGKTDDEIEKQLRLRNVPEELFESLLDMSFNKFNNLSIYALEKILPFMKEGYQYNEACEKAGYNFKAIYEGVRTKKLPVIEIDEIVNPVVNRALAQTRKVINSVIDKYGSPVRINIELARDLAKNFKDRKLIEKEQKENRANLDKIRENLRELMDKEPTVVEVLKYRLWEQQRGECAYTQSQIPLERLFSPGYCEIDHIIPFSRSFDDSLSNKILVLGSENQRKGNRTPYEYFGEDSERWNSFEIWVKGSYLNYKKKANLLKKKFSEEEQRDWKARNLQDTKYICRYISNFVNNRLEFKESENKQKVITVNGRATAYLRSRWGLNKVREDGDKHHALDAAVVGVTTQGMVQKISKYSKAHELYTVRKNDEFVDVETGECVDVDEYKEIRKDILPRPWRGFSEELKLRLSDNPLEELKKSPIETYNEEFIKENVKPIFVSRVPFRKISGKLFKETIYSERAFKDGYFVSKKSLVDLKRGDLDNFYNYECDKKLYDAISERMKEFNYNGKKAFESPFRKPTKSGKEGPVVRSVKIKSAVPFKDGIPMNEGLVAKEGMVRIDIYEKEGKYFVVPVYRYQLAKGIVPKRAAIAKKDELKWPIMDQTYNFKFSIYKNDLIEVKYDKKGVYFGYYDGFDRNSASLTIEKHDNSERYRSIGLKVGVLEINKYEVDVLGNYHKVKLGGN

SEQ ID NO: 64 - protein, 1195 aa, Elusimicrobium minutum
MQKNINTKQNHIYIKQAQKIKEKLGDKPYRIGLDLGVGSIGFAIVSMEENDGNVLLPKEIIMVGSRIFKASAGAADRKLSRGQRNNHRHTRERMRYLWKVLAEQKLALPVPADLDRKENSSEGETSAKRFLGDVLQKDIYELRVKSLDERLSLQELGYVLYHIAGHRGSSAIRTFENDSEEAQKENTENKKIAGNIKRLMAKKNYRTYGEYLYKEFFENKEKHKREKISNAANNHKFSPTRDLVIKEAEAILKKQAGKDGFHKELTEEYIEKLTKAIGYESEKLIPESGFCPYLKDEKRLPASHKLNEERRLWETLNNARYSDPIVDIVTGEITGYYEKQFTKEQKQKLFDYLLTGSELTPAQTKKLLGLKNTNFEDIILQGRDKKAQKIKGYKLIKLESMPFWARLSEAQQDSFLYDWNSCPDEKLLTEKLSNEYHLTEEEIDNAFNEIVLSSSYAPLGKSAMLIILEKIKNDLSYTEAVEEALKEGKLTKEKQAIKDRLPYYGAVLQESTQKIIAKGFSPQFKDKGYKTPHTNKYELEYGRIANPVVHQTLNELRKLVNEIIDILGKKPCEIGLETARELKKSAEDRSKLSREQNDNESNRNRIYEIYIRPQQQVIITRRENPRNYILKFELLEEQKSQCPFCGGQISPNDIINNQADIEHLFPIAESEDNGRNNLVISHSACNADKAKRSPWAAFASAAKDSKYDYNRILSNVKENIPHKAWRFNQGAFEKFIENKPMAARFKTDNSYISKVAHKYLACLFEKPNIICVKGSLTAQLRMAWGLQGLMIPFAKQLITEKESESFNKDVNSNKKIRLDNRHHALDAIVIAYASRGYGNLLNKMAGKDYKINYSERNWLSKILLPPNNIVWENIDADLESFESSVKTALKNAFISVKHDHSDNGELVKGTMYKIFYSERGYTLTTYKKLSALKLTDPQKKKTPKDFLETALLKFKGRESEMKNEKIKSAIENNKRLFDVIQDNLEKAKKLLEEENEKSKAEGKKEKNINDASIYQKAISLSGDKYVQLSKKEPGKFFAISKPTPTTTGYGYDTGDSLCVDLYYDNKGKLCGEIIRKIDAQQKNPLKYKEQGFTLFERIYGGDILEVDFDIHSDKNSFRNNTGSAPENRVFIKVGTFTEITNNNIQIWFGNIIKSTGGQDDSFTINSMQQYNPRKLILSSCGFIKYRSPILKNKEG

SEQ ID NO: 65 - protein, 1101 aa, Akkermansia muciniphila
MSRSLTFSFDIGYASIGWAVIASASHDDADPSVCGCGTVLFPKDDCQAFKRREYRRLRRNIRSRRVRIERIGRLLVQAQIITPEMKETSGHPAPFYLASEALKGHRTLAPIELWHVLRWYAHNRGYDNNASWSNSLSEDGGNGEDTERVKHAQDLMDKHGTATMAETICRELKLEEGKADAPMEVSTPAYKNLNTAFPRLIVEKEVRRILELSAPLIPGLTAEIIELIAQHHPLTTEQRGVLLQHGIKLARRYRGSLLFGQLIPRFDNRIISRCPVTWAQVYEAELKKGNSEQSARERAEKLSKVPTANCPEFYEYRMARILCNIRADGEPLSAEIRRELMNQARQEGKLTKASLEKAISSRLGKETETNVSNYFTLHPDSEEALYLNPAVEVLQRSGIGQILSPSVYRIAANRLRRGKSVTPNYLLNLLKSRGESGEALEKKIEKESKKKEADYADTPLKPKYATGRAPYARTVLKKVVEEILDGEDPTRPARGEAHPDGELKAHDGCLYCLLDTDSSVNQHQKERRLDTMTNNHLVRHRMLILDRLLKDLIQDFADGQKDRISRVCVEVGKELTTFSAMDSKKIQRELTLRQKSHTDAVNRLKRKLPGKALSANLIRKCRIAMDMNWTCPFTGATYGDHELENLELEHIVPHSFRQSNALSSLVLTWPGVNRMKGQRTGYDFVEQEQENPVPDKPNLHICSLNNYRELVEKLDDKKGHEDDRRRKKKRKALLMVRGLSHKHQSQNHEAMKEIGMTEGMMTQSSHLMKLACKSIKTSLPDAHIDMIPGAVTAEVRKAWDVFGVFKELCPEAADPDSGKILKENLRSLTHLHHALDACVLGLIPYIIPAHHNGLLRRVLAMRRIPEKLIPQVRPVANQRHYVLNDDGRMMLRDLSASLKENIREQLMEQRVIQHVPADMGGALLKETMQRVLSVDGSGEDAMVSLSKKKDGKKEKNQVKASKLVGVFPEGPSKLKALKAAIEIDGNYGVALDPKPVVIRHIKVFKRIMALKEQNGGKPVRILKKGMLIHLTSSKDPKHAGVWRIESIQDSKGGVKLDLQRAHCAVPKNKTHECNWREVDLISLLKKYQMKRYPTSYTGTPR

SEQ ID NO: 66 - protein, 1187 aa, Bifidobacterium longum
MLSRQLLGASHLARPVSYSYNVQDNDVHCSYGERCFMRGKRYRIGIDVGLNSVGLAAVEVSDENSPVRLLNAQSVIHDGGVDPQKNKEAITRKNMSGVARRTRRMRRRKRERLHKLDMLLGKFGYPVIEPESLDKPFEEWHVRAELATRYIEDDELRRESISIALRHMARHRGWRNPYRQVDSLISDNPYSKQYGELKEKAKAYNDDATAAEEESTPAQLVVAMLDAGYAEAPRLRWRTGSKKPDAEGYLPVRLMQEDNANELKQIFRVQRVPADEWKPLFRSVFYAVSPKGSAEQRVGQDPLAPEQARALKASLAFQEYRIANVITNLRIKDASAELRKLTVDEKQSIYDQLVSPSSEDITWSDLCDFLGFKRSQLKGVGSLTEDGEERISSRPPRLTSVQRIYESDNKIRKPLVAWWKSASDNEHEAMIRLLSNTVDIDKVREDVAYASAIEFIDGLDDDALTKLDSVDLPSGRAAYSVETLQKLTRQMLTTDDDLHEARKTLFNVTDSWRPPADPIGEPLGNPSVDRVLKNVNRYLMNCQQRWGNPVSVNIEHVRSSFSSVAFARKDKREYEKNNEKRSIFRSSLSEQLRADEQMEKVRESDLRRLEAIQRQNGQCLYCGRTITFRTCEMDHIVPRKGVGSTNTRTNFAAVCAECNRMKSNTPFAIWARSEDAQTRGVSLAEAKKRVTMFTFNPKSYAPREVKAFKQAVIARLQQTEDDAAIDNRSIESVAWMADELHRRIDWYFNAKQYVNSASIDDAEAETMKTTVSVFQGRVTASARRAAGIEGKIHFIGQQSKTRLDRRHHAVDASVIAMMNTAAAQTLMERESLRESQRLIGLMPGERSWKEYPYEGTSRYESFHLWLDNMDVLLELLNDALDNDRIAVMQSQRYVLGNSIAHDATIHPLEKVPLGSAMSADLIRRASTPALWCALTRLPDYDEKEGLPEDSHREIRVHDTRYSADDEMGFFASQAAQIAVQEGSADIGSAIHHARVYRCWKTNAKGVRKYFYGMIRVFQTDLLRACHDDLFTVPLPPQSISMRYGEPRVVQALQSGNAQYLGSLVVGDEIEMDFSSLDVDGQIGEYLQFFSQFSGGNLAWKHWVVDGFFNQTQLRIRPRYLAAEGLAKAFSDDVVPDGVQKIVTKQGWLPPVNTASKTAVRIVRRNAFGEPRLSSAHHMPCSWQWRHE

SEQ ID NO: 67 - protein, 166 aa, unidentified
  REGION 1..166: note = Description of Unknown: uncultured Termite sequence
MNKVQEIEYKKIREKLADREYRIGLDLGVGSIGYVVVSLKECNDLSYLPEDIILSGSRIFKSSIGAVERREFRLQRNSHRHHRERMRFLWQLLAEKQLALQSSKDLEKKENSADCETSQKRFPINILKEDPYILRYKALEEKLSLFQLGYVLYHIANHSNTAYENT

SEQ ID NO: 68 - protein, 1032 aa, unidentified
  REGION 1..1032: note = Description of Unknown: uncultured Termite sequence
MLYHIANHRGTDSVRSFLEYDDDKIKENTLTAKIAKETKKVIDAKKYRTFGEYLYKGKIEKFQQNIRKKVSNRKTPANKNKEFAVTRDVIIKETEKILASQKQYYTYILTDEYIKKIKDAISYQTEKLIPESGYCPYFKDEKRLPRSHKLNEYRRMYEALNNAKYFDPVLDENTGEILSYQEKEFSREEKKILFDEVLLKGMELTESGAKKLLYHLPDGCEVQLQGRDKTTQKIKGYALVDLEASPFWLRLSQQQQDEFLYDWNSLPLEKLKPKLTNYYSLTESEVDETFQEIKLPSNYASVGKKAMEILLTYIKDGCSYTEALEKAVSEGKLKVDKQTMIYDSLPYYGKILKESTQKLIGKAFSKQFADRNYKEPDTNKNEREFGKIANPVVHQTLNELRKLINEIITVFGKKPLEIGLETTRELKKSKKNREYLSKQQNKNEYARNRIYKEYIEPHLSQIKSRQENPSKYISKFELLEEQNFICPFCSEKITPDDIINSKVDVEHIFPIEESEDITKNNLVIAHNECNADKGKKSPFDAFGDKTSGKYRWNCILHNAQKNLPHKVWRFYQGSLEKFLENKPMSRRFGTDNSYISKIAARYLACLFNDPYHSEIFCIKSSLIAQLRIAWDLNSIMVPLVKNILSEKELEEFKISKNKKIRIDNRHHALDAIVIAYANRGYHNFLNRIHAKEYKINYREKSWLSKILLPPLNRDLEDFKISVKDSIEKANVSIKHDHNTNGSLVKATAYKVYYSGAGEYIITTSKNVEEISFKEKEDPKDTLYRALCKFECRDIDIKDEKLIKKLKYNSTLYKKVQNNLSKAKQELEQDNKKTEEEGKKSQKITEVRIYKKACSLVKGQYIQCGSRLKDKFFAVKEPTEIKTGLGYDTGDNLFLDLYYDKTGKLCGEIIRKVNFNRNKPNYQKEGYTLFERIYQSDILEVDTSEDRISLKNKTGSAPSDRTFIKVNTFTEVNAYFDGKRDKIQIFFGNLLKSSFKNDSFFISSMQKYNVRKVILTSLGIIKYRSQILKNKEV

SEQ ID NO: 69 - protein, 1032 aa, unidentified
  REGION 1..1032: note = Description of Unknown: uncultured Termite sequence
MKKRILGLDIGIASVGWALVEFDDEFQDNKKKGTIIKSGVRIFTRAETPKERESLAKPRREARSQRRRIRRRVERLNSIRELFVKNGVVEEWSVSKKNPNNIYITLNQIKTPWQLRMESLDRKLTNEQFAVVLTHLAKHRGYKSLRKDDKAGKVLEAISQNKKRLNDSDYRTLGEMFCKNESYKEHKRNKGGEYINSVARELIEEEVEKIFVKQREKGNNFADVNTEREYLKIAFSQKPAGSISKMVGFCTFENGEKRAPRDSYSAELFKVLCTINNTTFTDMKTGEIRSFSKEEIGKTLETVKNVKDVKYAKIRKDLGLEDSVKFSGVDYRENAKSKGEGEIFVSMKTYHEIKSKIEKLSKEKWDNLKGNTELLDSIVNIIANLKDDESIKKEFQKLKIDEDIIDVLLNFEFKKFINLSFKALRKIIPFQFQGQKYITASTSAGYSLKQEGIKNKLVPPAKENINVAVVARAFAQTRKVINAVIRKYGQFDQINIELATELKNSKFDRSKIEEGQKKFQSQKDKIFKEVQELRGGMTPSSSLLLKYRLWREQDERCVYSGRKISFEDLLDTGFLDIDHIIPYSKSMDDSFNNKVLCLAEENRNKKNDIPFNYYQRIDRDWNLLISIITSMKNMKIAKKSRLLKQELSDIEGFIERNINDTRYATRYIKDFLENNLEFKENEFIKVKVQARSGGLTSVLSYNWGMSKDREESYFHHAKDAIIVACSTQGMVQYISKISQQYENDKDKMKKIKDKTENCIPKPWDSFRADVEESIEGIFVSFAPRHKVTGSAHKETIYSKKHLEKERYVTVKKSLDKIKLSDLENIPCNENCGIIRVLKERLEKFKNDSLKAFADPVHMPTKCPNKKGPVIRSVKIKESNKTGIEVRKGLAERGEMVRVDVFIKDKKYYLVPIYVSDFKNKDLPNKAIAALKLENEWIMIDKTYSFKFSLFKDDLIKIKKKKEEIFGYFGGVHRSTGTIKIKSRHKPKEIDEGIGSRCLLDFRKFQVDVLGNYTEVKHEKRMPAYITRKDKKH

SEQ ID NO: 70 - protein, 1361 aa, Lactobacillus casei
MTKLGKPYGIGVDIGSNSIGFAAVDENSHLIRLKGKTVIGARLFEEGKAAADRRASRTTRRRLSRNRWRLSFLRDFFESHITPTGPNFFMRQKYSEISPKDKARYKYEKRLFNDRTDAEFYQQYPTMYHLRNRLLTDPSKADVREIYFAIHHILKSRGHFLTSGYAKDFNTNKVALNEIFPALQDAYAQVYPDLDITFDENKVNEFKTVLLNEKATPSDTQRALVNLLLAEDGDKDILKQQKQVLTEFAKAVVGLKTKLNVALGTEVDSSEATVWNFSLGQLDDKWAGIESAMTDEGTEILDQIRDLYRARLLNGIVPAGKTLSQAKVDDYAQHHEDLELFKDYLKQLEDDGTAKAIRQLYDRYIDGDDAKPFVREDFVKALTKEVTAHPNAKSPELLERLAQPDFMLKQRNKANGAIPVQMQQRELDQIIKNQSVYYDWLAAPNPVEKHRKSMPYQLDELLNFRIPYYVGPLVTAKEQKAAQGGVFAWMVRKDPDGNITPYNFDEKVDREASANTFIQRMKTTDTYLIGEDVLPKQSLLYQRYEVLNELNNVRVNNEKLSIEQKQQVIRELFERHNSVTIKQFAENLRAHGDYAHIPEIRGLADEKRFLSSLSTYRQLKSLLPDAIDDPAKQADIENIIAWSTVFEDAAIFKTKLKEINWLDSQTITKLSNIRYRGWGQFSHKFLNGLTLGNGHTIIQELFLSNNNLMQILTDETLQKKMTELNADKLKAANINDAIDDAYTSPSNKKALRQVLRVIEDIKRAADGQDPSWLYVETADGGGTPGKRTRARQHQLQEIYANAAHELIDSAVRGELEDKIADKADFNDRLVLYFMQGGRDIYTGTPLNIDQLSSYDIDHILPQSLIKDNSLDNRVLVHAIINREKNATFASTIYAQKMNATWRQWHEAGLISGRKLRNLQMRPDQIDKYASGFVARQLVETRQIIKLTEQIVAAQYPETKIIAVKAGLSHQLREELEFPKNRDVNHYHHAFDAFLAARIGTYLLKRFPNLQAFFTYGKFKKADVKKLRGFNFIRDITHAEDKIVVKDTGEVIWDKKRDVDELDRIYNFKRMLITHEVHFEKADLFKQTVYGAKDSKEAGGKKQLISKKKGYPVDIYGGYTQETGSYLSVVRLTKKAMYAVVKVSTRDAAKLAVAKSISEQKENETLNDIIDEKLSKISKNGKITHELFEVVLPRVGQKTLFKNSKYNLFLVNSDTYMHNYQELWMPREYQKMWKDISLSKYGDAQTEDQLDQIFGFIVSQVNSYFNLYDINQFRKKLNDAADKFATLPMRDTDDMQGKIATIGQLLIGLQANAARSDLRNLDIKTPLGLLQIPNGISLDSDTSVVYQSPTGLLEREVHLSDL

SEQ ID NO: 71 - protein, 1348 aa, Streptococcus equi
MKKPYTIALDIGTNSVGWVVVTDDYRVPTKKMKVLGNTERKTIKKNLIGALLFDSGDTAEGTRLKRTARRRYTRRKNRLRYLKEIFTEEMAKVDDGFFQRLEDSFYVLEDKEGNKHPIFANLADEVAYHKKYPTIYHLRKELVDNPQKADLRLIYLAVAHIIKFRGHFLIEGTLSSKNNNLQKSFDHLVDTYNLLFEEQRLLTEGINAKELLSAALSKSKRLENLISLIPGQKKTGIFGNIIALSLGLTPNFKANFGLSKDVKLQLAKDTYADDLDSLLAQIGDQYADLFLAAKNLSDAILLSDILTESDEITRAPLSASMVKRYREHHKDLVTLKTLIKDQLPEKYQEIFLDKTKNGYAGYIEGQVSQEEFYKYLKPILARLDGSEPLLLKIDREDFLRKQRTFDNGSIPHQIHLEELHAILRRQEVFYPFLKDNRKKIESLLTFRIPYYVGPLARGHSRFAWVKRKFDGAIRPWNFEEIVDEEASAQIFIEKMTKNDLYLPNEKVLPKHSLLYETFTVYNELTKVKYATEGMTRPQFLSADQKQAIVDLLFKTNRKVTVKQLKENYFKKIECWDSVEITGVEDSFNASLGTYHDLLKIIQDKDFLDNPDNQKIIEDIILTLTLFEDKKMISKRLDQYAHLFDKVVLNKLERHHYTGWGRLSGKLINGIRDKQSGKTILDFLKADGFANRNFMQLIHDSELSFIDEIAKAQVIGKTEYSKDLVGNLAGSPAIKKGISQTIKIVDELVKIMGYLPQQIVIEMARENQTTAQGIKNARQRMRKLEETAKKLGSNILKEHPVDNSQLQNDKRYLYYLQNGKDMYTGDDLDIDYLSSYDIDHIIPQSFIKNNSIDNKVLTSQGANRGKLDNVPSEAIVRKMKGYWQSLLRAGAISKQKFDNLTKAERGGLTQVDKAGFIQRQLVETRQITKHVAQILDSRFNTEFDDHNKRIRKVHIITLKSKLVSDFRKEFGLYKIRDINHYHHAHDAYLNAVVAKAILGKYPQLAPEFVYGDYPKYNSFKERQKATQKMLFYSNILKFFKDQESLHVNSDGEEIWNANKHLPIIKNVLSIPQVNIVKKTEVQTGGFYKESILSKGNSDKLIPRKNNWDTRKYGGFDSPTVAYSVLVIAKMEKGKAKVLKPVKEMVGITIMERTAFEENPVVFLEARGYREIQEHLIIKLPKYSLFELENGRRRLLASASELQKGNELFLPVDYMTFLYLAAHYHELTGSSEDVLRKKYFVDRHLHYFDDIIQMINDFAERHILASSNLEKINHTYHNNSDLPVNERAENIINVFTFVALGAPAAFKFFDATIDRKRYTSTKEVLNATLIHQSVTGLYETRIDLSQLGEN

SEQ ID NO: 72 - protein, 1341 aa, Ruminococcus lactaris
MGKGYYVGLDMGTGSVGWAVTDESYQILRRHGKAMWGVRLFESAKTAEERRMFRTGRRRLDRRGWRIEILQEIFAEEISRVDPGFFLRMKESKYYPEDKRDIQGNCPELPYTLFVDKTFTDKDFHKKYPTIYHLRKMLMETEDTPDMRLVYLALHHMMKHRGHFLLSGDISQVTEFKNTFNQFIENIRNEEMDFEIELDESAVQMIEETLKDKNLTRSAKKSKLVKGLNAKNVRDKAFLTLLSGGTVKLSDLFGMEELNEGERPKISFADNGYEEYAAVVEMELGELYYIVESAKAVYDWAILSDILGGSTSVSDAKVRAYEKHKADLKYLKAVVKEYFPKEVYNAVFVESSDKLNNYPAYIGMTKKNGKKVSLEGKRCSREEFMDFLKKNIVVKLPDEEAKMYLQSELEKDSFLPKQVNKDNGVIPYQVHKYELKKILDNLGDKIPFLKENAEKIEKLFSFRIPYYVGPLRTGNGENSKFAWAERKSTEKIYPWNFENVIDVEQSAENFIRRMTNKCTYLIGEDVLPKDSLLYSKFMVLNELNNLRLDGQKISVELKQKIYRDVFCRSRKVTQKKLKSYLIREGIAGKNVELTGIDGDFKGSLTAYHDFKEKLIDVELTQKEKEEIILNIVLFGDDKKLLKQRLKKKFPQLTEKQINTVTALSYKGWGRLSKKLLEEVTVPAPETGEVWNIITALWETNDNFMQLLSKEYQFSDRIEEFNEEKADPEVSYQTIEDLYVSPAVKRQIWQTLQIIQEIEKVMGEKPKRVFVEMAREKQENKRTESRKKTLSDLYTKCKKEEPEWIEALCTSLEKHEEHQLRSDKLYLYYTQKGRCMYSGEPIDLEDLWDNTKYDIDHIYPQSKTMDDSLKNRVLVKKEYNAKKSDTYPIAADIQKKMMPFWKSLLTGGFIPKEKYDRLVRNNPLDANELAGFIERQIVETRQSTKAVAEILKKILPDTEIVYVKAKTVSKFRQDFDFIKVRDMNDLHHAKDAYLNIVVGNVYFVKFTKNAAWFVKENPGRTYNLEKMFIWDVARDGEIAWKAGKSGSIVQVRAMMEKNHILVTRRSYEVKGGLFDQQILKKGKGQVPVKESDERLRDIGKYGGYNKAAGVYFMLVSSKDKKGKEQRTIEFVPIYLKDRVEKDMESARNYLMEERGLREPKILIKKIKIDTLFKVDGFYMWLSGRTSNQLIFKGANQLILSKEDMKTLKKVVKYIQRQKEDKNVKISMRDGITEEELLKLYETFLDKIRHSIYGARLSSQEKTLVNGKEKFIDLSVEAKCQVLYEILHLFQCQSGAANLKMIGGPASAGILVMNNNISKCKNISIVNQSPTGIYEKEIDLLRV

SEQ ID NO: 73 - protein, 1003 aa, Gluconacetobacter diazotrophicus
MIDESLTFGIDLGIGSCGWAVLRRPSAFGRKGVIEGMGSWCFDVPETSKERTPTNQIRRSNRLLRRVIRRRRNRMAAIRRLLHAAGLLPSTDSDALKRPGHDPWELRARGLDKPLKPVEFAVVLGHIAKRRGFKSAAKRKATNISSDDKKMLTALEATRERLGRYRTVGEMFARDPDFASRRRNREGKYDRTTARDDLEHEVHALFAAQRRLGQGFASPELEEAFTASAFHQRPMQDSERLVGFCPFERTEKRAAKLTPSFERFRLLARLLNLRITTPDGERPLTVDEIALVTRDLGKTAKLSIKRVRTLIGLEDNQRFTTIRPEDEDRDIVARTGGAMTGTATLRKALGEALWTDMQERPEQLDAIVQVLSFFEANETITEKLREIGLTLAVLDVLLTALDAGVFAKFKGAAHISTKAARNLLPHLEQGRRYDEACTMAGYDHAASRLSHHGQIVAKTQFNALVTEIGESIANPIARKALIEGLKQIWAMRNHWGLPGSIHVELARDVGNSIEKRREIEKHIEKNTALRARERREVHDLLDLEDVNGDTLLRYRLWKEQGGKCLYTGKAIHIRQIAATDNSVQVDHILPWSRFGDDSFNNKTLCLASANQQKKRSTPYEWLSGQTGDAWNAFVQRIETNKELRGFKKRNYLLKNAKEAEEKFRSRNLNDTRYAARLFAEAVKLLYAFGERQEKGGNRRVFTRPGALTAALRQAWGVESLKKQDGKRINDDRHHALDALTVAAVDEAEIQRLTKSFHEWEQQGLGRPLRRVEPPWESFRADVEATYPEVFVARPERRRARGEGHAATIRQVKERECTPIVFERKAVSSLKEADLERIKDGERNEAIVEAIRSWIATGRPADAPPRSPRGDIITKIRLATTIKAAVPVRGGTAGRGEMVRADVFSKPNRRGKDEWYLVPVYPHQIMNRKAWPKPPMRSIVANKDEDEWTEVGPEHQFRFSLYPRSNIEIIRPSGEVIEGYFVGLHRNTGALIPTPVGPDSYVIA

SEQ ID NO: 74 - protein, 1368 aa, Streptococcus pyogenes
MDKKYSIGLDIGTNSVGWAVITDDYKVPSKKFKVLGNTDRHSIKKNLIGALLFDSGETAEATRLKRTARRRYTRRKNRICYLQEIFSNEIAKVDDSFFHRLEESFLVEEDKKHERHPIFGNIVDEVAYHEKYPTIYHLRKKLADSTDKADLRLIYLALAHMIKFRGHFLIEGDLNPDNSDVDKLFIQLVQTYNQLFEENPINASRVDAKAILSARLSKSRRLENLIAQLPGEKRNGLFGNLIALSLGLTPNFKSNFDLAEDAKLQLSKDTYDDDLDNLLAQIGDQYADLFLAAKNLSDAILLSDILRVNTEITKAPLSASMIKRYDEHHQDLTLLKALVRQQLPEKYKEIFFDQSKNGYAGYIDGGASQEEFYKFIKPILEKMDGTEELLAKLNREDLLRKQRTFDNGSIPHQIHLGELHAILRRQEDFYPFLKDNREKIEKILTFRIPYYVGPLARGNSRFAWMTRKSEETITPWNFEEVVDKGASAQSFIERMTNFDKNLPNEKVLPKHSLLYEYFTVYNELTKVKYVTEGMRKPAFLSGEQKKAIVDLLFKTNRKVTVKQLKEDYFKKIECFDSVEISGVEDRFNASLGTYHDLLKIIKDKDFLDNEENEDILEDIVLTLTLFEDREMIEERLKTYAHLFDDKVMKQLKRRRYTGWGRLSRKLINGIRDKQSGKTILDFLKSDGFANRNFMQLIHDDSLTFKEDLQKAQVSGQGDSLHEHIANLAGSPAIKKGILQTVKVVDELVKVMGRHKPENIVIEMARENQTTQKGQKNSRERMKRIEEGIKELGSDILKEYPVETTQLQNEKLYLYYLQNGRDMYVDQELDINRLSDYDVDHIVPQSFLKDDSIDNKVLTRSDKNRGKSDNVPSEEVVKKMKNYWKQLLNAKLITQRKFDNLTKAERGGLSELDKAGFIKRQLVETRQITKHVAQILDSRMNTKYDENDKLIREVRVITLKSKLVSDFRKDFQFYKVREINNYHHAHDAYLNAVVGTALIKKYPKLESEFVYGDYKVYDIRKMIAKSEQEIGKATAKYFFYSNIMNFFKTEITLANGEIRKRPLIETNGETGEIVWDKGRDFATVRKVLSMPQVNIVKKTEVQTGGFSKESILPKRNSDKLIARKKDWDPKKYGGFDSPTVAYSVLVVAKVEKGKSKKLKSVKELVGITIMERSSFEKDPVDFLEAKGYKEVRKDLIIKLPKYSLFELENGRKRMLASAGELQKGNELALPSKYVNFLYLASHYEKLKGSPEDNEQKQLFVEQHKHYLDEIIEQISEFSKRVILADANLDKVLSAYNKHRDKPIREQAENIIHLFTLTNLGAPAAFKCFDTTIGRNRYKSIKEVLDATLIHQSITGLYETRIDLSQLGGD

SEQ ID NO: 75 - protein, 1504 aa, Bacteroides dorei
MKNIVGLDLGTNSIGWAVVNGSVNDDGSEQLVKIQASGSRIIPMDAAMIGDFNKGNSISQTAERTRLRGVRRLSERYLLRRERLHRILDILGFLPFHFAQDLDRHGKIVKGKEPKLAWRKNEAGQFEFIFQDSFKEMLEDFKLNYPNLITDDKKVPYDWTIYYLRKKGLTSKISKEELAWILLNFNQKRGYYQLRGEEEEENKDKLVEFYALKVVAVEDSGEKKGKDIWYNVHLENGWVYRRTSNMSLDWVGKTKEFIVTTDLEKDGTPKKDKEGNVKRSFRAPKEDDWSLVKKKTEADIDQTHKTVGAYIYDTLLGNPSQKIRGRLVRTIERKYYKEELKLILEKQKEFHLELQDRALYAACIEELYPINEAHRNNVGNRDFTYLFLEDILFYQRPLKSKKSLIDNCPYEENQGLDKETGEIKSFPVKCIAKSHPLFQEFRLWQFIINLRIYRKDLAQDVDVTNELLKTEEDYVALFDWLNGKKEIDQKAFLKYPVFGLKKEIENYRWNYVQDKPYPCNETRSLMLARLEKCDISIEFLTKENEEALWHILYSVEDKNEIVKALQKFADKHDLNASFVDVFQKFPPFKKEYGSYSAKAIKKLLPLMRMGKYWSENSIDKGTRERIDKIITGEYDEKIENRVREKAIHLADVSDFKGLPLWLVCYIVYGRHSEAKEIIQWKSPADIDSYLRSFKQHSLRNPIVEQIIIETLRVVRDIWKQVGNIDEIHVELGREMKNPADKRKKMTQQMSENENTNLRIKYLLTEFLNPEYEVENVRPYSPSQQDILRIYEEGVLNSVSDLPEEISDILKKFTETDLKKRPSRSEVLRYKLWLEQKYRSPYTGEVIPLGKLFTPAYEIEHVIPQSYYFDDSFSNKVICEAEVNKLKSNLLGHEFIVKHHGEIVELPFGKKVRIFTVDEYEQFVKDNYSRTRSKMKKLLMDDIPEEFVTRQLNDSRYISKVVKSLLSNIVREKGEEEAISKNVIPCTGGVTDRLKKDWGINEVWNKIILPRFQRLNELTGTNKFTTKNVGIQEIPTMPLELQKGFNKKRIDHRHHAMDAIIIACANRNIINYLNNKSATAKAELSRYDLQKMLCDKAKTDNNGNYKWVIRKPWASFTQDTYLALENIIVSFKQNLRVINKATNRFLHYNEEGKKIFVKQGKGDNWAIRKSMHKDTVFGEVNLRRIKTVALNEAMKNPQSIVVKDFKRKLLELWNLGFDAKRIKKYFEDNRETWSDINLSKIEVYYFSKDTKDRFFATRKPLDTSFDRKKIENNITDTGIQKILLRHLELKDNNPDIAFSPDGIDEMNRNIIQLNNGKYHQPIIKIRWYEQADKFAVGQTGNKSSKFVEAAKGTNLFFAVYESNILDKKTNTIIKKRNYATIPLNVAIERQKQGLPVAPEDENGNDPIFVLSPNDLVYLPTDDELANGIIAQPLDRGRIYKMVSSSGEQCFFIKHIVANVLVDKFEFSPLNKMERALTGEMIKMICIPIKVDRLGNVLESSSSYKK

SEQ ID NO: 76 - protein, 1426 aa, Capnocytophaga sputigena
MKNILGLDLGITSISFAHIVEDENKEKSEIKELGVRIVSLTTDEQSDFEKGKSITTNANRTLKHGARLNLDRYQQRRKYLIDLLQKANLITSSSILAENGKNTTHSTWQLRAKAVTERIEKEEFARVLLAINKKRGYKSSRKAKTEDEGQAIDGMAIAKRLYDENLTPGQLSLQLLQQNKKLLPDFYRSDLQREFDLVWNFQKQFYPDILTDSFYKELQGKGKDATSKAFSKRYHFDTAENKGSKESVRLQAYQWRAEAISKQLSKEEVAYVLTEINNNLNNASGYLGAISDRSKELYFNRQTVGQYLYAQLQENRHNSLKNKVFYRQDYLDEFERIWETQASFHKELTDELKKQIRDVVIFYQRKLKSQKGLISFCEFESKEIEIEKDGKTITKTIGARVVPKSSPLFQEFKIWQILNNVTCKRKGIRKKKSSAKSTELDLFNEPSQTIFSLDMECKQLLFDELNLKGDLKSDKVLKLLGYSPQEWEINYNQLEGNRTQKALYEAYLKIVEMEAHDVKDILQIKSAKDDWSLDESPLSASEIKEKVKDIFQALGICTKILYFDPLLPVKEFEKQDSYQLWHLLYSYESDDSTSGNETLYRILEKKYAFKREHARILANVALQDDYGSLSTKAIRKIYPNIKENQYSKACELAGYKHSKLSLTTEELEARELKNIIPLLKKNALRNPVVEKILNQMINVVNALIEKNSERDAEGKITKYFHFDEIRIELARELKKNAQKRYEMTQNINKAKLEHQKISEILQKKFGIKNPTKSDIIRYRLYQELEHNGYKELYTNAPIARDMLFSKNIEIEHIVPKARVFDDSFSNKTLTFHRINSNKGEYTAFDYITSLNSEEELNQYLTRVENAYKTKSISLTKYKNLLKKASEIGDGFINRDLRDTQYIAKKAKEILFQVTKNVLSTSGSITDRLREDWGLVDVMKELNMPKYQSLGLTEVEERKEGNKVTVIKNWTKRNDHRHHAMDALTVAFTKPSYIQYLNHLNARKDENNKNYSVILAIEEKETIKVPTNNGKNKRVFIEPIPNFRQVAKKHLEEIFISHKAKNKVVTKNVNKPAGTDKQQITLTPRGQLHKETIYGKYQYYVNKEEKVGVKFDERTITKVSNPLYREALLKRLQANDNDPKKAFTGKNALSKNPIYLDETKTKTLPEKVNLTYLEEDFSIRKDISPDNFKDLKSIEKVIDQGVKRILIKRLQDYDNDPKKAFVDLEKNPIWLNKEKGIAIKRVTISGVSNAQPLHIGKDHLGKTTLNKEGNEIPVDYVSTGNNHHVAIYRDKEGNLQEQIVSFFEAVVRTQQGLPIIDKTYKQEEGWQFLFTMKQNEMFVFPNATTGFNPAEIDLLDPKNKKLISPNLFRVQKIATKDYFFRHHLETNVETDNVLKNTTWKREGLSGLKDIVKVRINHLGDIVSIGEY

SEQ ID NO: 77 - protein, 1443 aa, ParaBacteroides johnsonii
MIKLLYLEKLKQYTMKKILGLDLGTSSIGWALVNEAENSDEVSSIIKLGVRVNPLTVDEMQNFEKGKSITTNADRTLKRSMRRNLQRYKLRRDALIELLKKVGFITDKTILSEQGNRTTFETYRLRAKAAEEEISLKELARVLLMINKKRGYKSSRKAKGEEEGALIDGMEIAKKLYDEDLTPGQLCLQLLESGKKFFPDFYRSDLQEEFNKIWDFQKQFNLFSFCDVAKEEVKGKNKSQTWAILAKYFVETKKVNVWNEHEAQTENREEVYKLVGLKRTVKGEELKKENYRWRVQALTEQLDLEKIAVVLQEINGQISASSGYLGAISDRSKVLYFNRQTVGQYQMAELNKNPNMSLRNMVFYRQDYLDEFNVIWEKQAEFHKELTPELKKEIRDIIIFYQRRLKSQKGLISFCEFENREVVVEKEGKKQTKIIGCKVIPRSHPLFQEFKIWQTLNNIEVFVGEKKGKRKKSNVSSDLFGDTEDALITEGRRFLYQEEKKILAKELSIKKGLTKAEILRLLFENPQELDINFKQIDGNQTGFALFSAYSNMIEKYGYEPLDFKKPAEDLISQLKTVFTDLGWNTDLLFIDLDKENKEWEKQPYFRLWHLLYSFEGDNTPTGNGKLIEKIMQLCGIEKEYAIELANVSLQDDYGSLSAKAIKKILLYLKEGNQYDMACEYAGYRHSKSSLTKEEIENKVLKDKLEILPKNSLRNPVVEKILNQMVNVINTVMEVYGRPDEIRVELARELKKSAKEREELTKAVAKNTREHEEIRKVLQSEFGMINVSRNDIIRYKLYEELKDNGYKTLYSNQYIPREKLFSKEIDIEHIIPQSRLFDDSLSNKTLEYKSINIEKGNKTAYDFVKEKYGEEGLQQYLNRCENLCKDKKAKLRKLKMELNEIPDGFIDRDLRNTQYIAKKALSMLTEICRRVVATTGSITDKLREDWQLVDVMKELNLPKYEALGLVEVYEDKDGRKIKRIKDWTKRNDHRHHAMDALTVAFTKDVFIQYFNNKNAAWESDSKEHTNIVGIKTRYFESGKAVPPIPLGQFRVEAKCHLENLLVSIKAKNKVVTTNVNCIKKKGGTYKNTQQTPRGQLHLETIYGSHNQYVTKIEKVNASFDAVKIATVSKQDYRNALLKRLEVFGNDPKKAFTGKNSLEKNPIYLDRAQTIQVPDKVQTVELETAYTIRKPVDPTLNVDKVVDKKIRLILEQRLKEYGGDAKKAFVNLDENPIWLNEEKGISIKRVTIRGISKAQALHDKKDKDGNFILDETGKRIPVDFVNTGNNHHVAIYRKPVLDKKGQVIFDDEGNPMYELDEDVVPFFEAVTRANLGIPIIDKDYKKSEGWQFLFSMKQNEYFVFPNEKTGFNPKEVDLLDPDNYAMISPNLFRVQKIGLNDYTFRHHLETTIQNDLKFITWIRCGKSGIKDIVKVRINHIGQIVSVGEY

SEQ ID NO: 78 - protein, 984 aa, Campylobacter jejuni
MARILAFDIGISSIGWAFSENDELKDCGVRIFTKVENPKTGESLALPRRLARSARKRLARRKARLNHLKHLIANEFKLNYEDYQSFDESLAKAYKGSLISPYELRFRALNELLSKQDFARVILHIAKRRGYDDIKNSDDKEKGAILKAIKQNEEKLANYQSVGEYLYKEYFQKFKENSKEFTNVRNKKESYERCIAQSFLKDELKLIFKKQREFGFSFSKKFEEEVLSVAFYKRALKDFSHLVGNCSFFTDEKRAPKNSPLAFMFVALTRIINLLNNLKNTEGILYTKDDLNALLNEVLKNGTLTYKQTKKLLGLSDDYEFKGEKGTYFIEFKKYKEFIKALGEHNLSQDDLNEIAKDITLIKDEIKLKKALAKYDLNQNQIDSLSKLEFKDHLNISFKALKLVTPLMLEGKKYDEACNELNLKVAINEDKKDFLPAFNETYYKDEVTNPVVLRAIKEYRKVLNALLKKYGKVHKINIELAREVGKNHSQRAKIEKEQNENYKAKKDAELECEKLGLKINSKNILKLRLFKEQKEFCAYSGEKIKISDLQDEKMLEIDHIYPYSRSFDDSYMNKVLVFTKQNQEKLNQTPFEAFGNDSAKWQKIEVLAKNLPTKKQKRILDKNYKDKEQKNFKDRNLNDTRYIARLVLNYTKDYLDFLPLSDDENTKLNDTQKGSKVHVEAKSGMLTSALRHTWGFSAKDRNNHLHHAIDAVIIAYANNSIVKAFSDFKKEQESNSAELYAKKISELDYKNKRKFFEPFSGFRQKVLDKIDEIFVSKPERKKPSGALHEETFRKEEEFYQSYGGKEGVLKALELGKIRKVNGKIVKNGDMFRVDIFKHKKTNKFYAVPIYTMDFALKVLPNKAVARSKKGEIKDWILMDENYEFCFSLYKDSLILIQTKDMQEPEFVYYNAFTSSTVSLIVSKHDNKFETLSKNQKILFKNANEKEVIAKSIGIQNLKVFEKYIVSALGEVTKAEFRQREDFKK

SEQ ID NO: 79 - protein, 1082 aa, Neisseria meningitidis
MAAFKPNPINYILGLDIGIASVGWAMVEIDEDENPICLIDLGVRVFERAEVPKTGDSLAMARRLARSVRRLTRRRAHRLLRARRLLKREGVLQAADFDENGLIKSLPNTPWQLRAAALDRKLTPLEWSAVLLHLIKHRGYLSQRKNEGETADKELGALLKGVADNAHALQTGDFRTPAELALNKFEKESGHIRNQRGDYSHTFSRKDLQAELILLFEKQKEFGNPHVSGGLKEGIETLLMTQRPALSGDAVQKMLGHCTFEPAEPKAAKNTYTAERFIWLTKLNNLRILEQGSERPLTDTERATLMDEPYRKSKLTYAQARKLLGLEDTAFFKGLRYGKDNAEASTLMEMKAYHAISRALEKEGLKDKKSPLNLSPELQDEIGTAFSLFKTDEDITGRLKDRIQPEILEALLKHISFDKFVQISLKALRRIVPLMEQGKRYDEACAEIYGDHYGKKNTEEKIYLPPIPADEIRNPVVLRALSQARKVINGVVRRYGSPARIHIETAREVGKSFKDRKEIEKRQEENRKDREKAAAKFREYFPNFVGEPKSKDILKLRLYEQQHGKCLYSGKEINLGRLNEKGYVEIDHALPFSRTWDDSFNNKVLVLGSENQNKGNQTPYEYFNGKDNSREWQEFKARVETSRFPRSKKQRILLQKFDEDGFKERNLNDTRYVNRFLCQFVADRMRLTGKGKKRVFASNGQITNLLRGFWGLRKVRAENDRHHALDAVVVACSTVAMQQKITRFVRYKEMNAFDGKTIDKETGEVLHQKTHFPQPWEFFAQEVMIRVFGKPDGKPEFEEADTPEKLRTLLAEKLSSRPEAVHEYVTPLFVSRAPNRKMSGQGHMETVKSAKRLDEGVSVLRVPLTQLKLKDLEKMVNREREPKLYEALKARLEAHKDDPAKAFAEPFYKYDKAGNRTQQVKAVRVEQVQKTGVWVRNHNGIADNATMVRVDVFEKGDKYYLVPIYSWQVAKGILPDRAVVQGKDEEDWQLIDDSFNFKFSLHPNDLVEVITKKARMFGYFASCHRGTGNINIRIHDLDHKIGKNGILEGIGVKTALSFQKYQIDELGKEIRPCRLKKRPPVR

SEQ ID NO: 80 - protein, 1021 aa, Clostridium cellulolyticum
MKYTLGLDVGIASVGWAVIDKDNNKIIDLGVRCFDKAEESKTGESLATARRIARGMRRRISRRSQRLRLVKKLFVQYEIIKDSSEFNRIFDTSRDGWKDPWELRYNALSRILKPYELVQVLTHITKRRGFKSNRKEDLSTTKEGVVITSIKNNSEMLRTKNYRTIGEMIFMETPENSNKRNKVDEYIHTIAREDLLNEIKYIFSIQRKLGSPFVTEKLEHDFLNIWEFQRPFASGDSILSKVGKCTLLKEELRAPTSCYTSEYFGLLQSINNLVLVEDNNTLTLNNDQRAKIIEYAHFKNEIKYSEIRKLLDIEPEILFKAHNLTHKNPSGNNESKKFYEMKSYHKLKSTLPTDIWGKLHSNKESLDNLFYCLTVYKNDNEIKDYLQANNLDYLIEYIAKLPTFNKFKHLSLVAMKRIIPFMEKGYKYSDACNMAELDFTGSSKLEKCNKLTVEPIIENVTNPVVIRALTQARKVINAIIQKYGLPYMVNIELAREAGMTRQDRDNLKKEHENNRKAREKISDLIRQNGRVASGLDILKWRLWEDQGGRCAYSGKPIPVCDLLNDSLTQIDHIYPYSRSMDDSYMNKVLVLTDENQNKRSYTPYEVWGSTEKWEDFEARIYSMHLPQSKEKRLLNRNFITKDLDSFISRNLNDTRYISRFLKNYIESYLQFSNDSPKSCVVCVNGQCTAQLRSRWGLNKNREESDLHHALDAAVIACADRKIIKEITNYYNERENHNYKVKYPLPWHSFRQDLMETLAGVFISRAPRRKITGPAHDETIRSPKHFNKGLTSVKIPLTTVTLEKLETMVKNTKGGISDKAVYNVLKNRLIEHNNKPLKAFAEKIYKPLKNGTNGAIIRSIRVETPSYTGVFRNEGKGISDNSLMVRVDVFKKKDKYYLVPIYVAHMIKKELPSKAIVPLKPESQWELIDSTHEFLFSLYQNDYLVIKTKKGITEGYYRSCHRGTGSLSLMPHFANNKNVKIDIGVRTAISIEKYNVDILGNKSIVKGEPRRGMEKYNSFKSN

SEQ ID NO: 81 - protein, 1131 aa, Acidovorax ebreus
MAQHVFGLDIGIASVGWAILGEQRIIDLGVRCFDKAETAKEGDPLNLTRRQARLLRRRLYRRAWRLTQLSRLLKRKGLIADAKLFAKAPSYGDSAWELRRQGLDRLLTPLEWARVIYHQCKHRGFHWTSKAEEAKADSDAEGGRVKQGLAHTKALMQAKNYRSAAEMVLAEFPDAQRNKRGQYDKALSRVLLGEELALLFATQRRLGNPHASDFFEKLILGDGDRKSGLFWQQKPALSGADLLKMLGKCTFEKGEYRAPKASFSVERHVWLTRLNNLRIVVDGRSRPLNEAERQAALLLPYQTETSKYKTLKNAFIKAGLWGDGVRFGGLAYPSQAQIDAEKTKDPEDQFLVKLPAWHELRKAFKAAGHEALWQQISTPALDGDPTLLDQIATVLSVYKDGAEVVQQLRQLALPEPAASIAVLEKISFDKFSSLSLKALRRIVPLMQSGLRYDEAVAQIPEYGHHSQRIEPGAAKHLYLPPFYEAQRKYAGKGDHIGSMQFRDDADIPRNPVVLRALNQARKVVNALIREYGSPIAVNIEMARDLSRPLDERNKVKRAQEEFRDRNDRARSEFERDFGYKPKAAAFEKWMLYREQLGQCAYSQQPLDIQRVLDDHNYAQVDHALPYSRSYDDSKNNKVLVLTHENQNKGNRTAFEYLTSFPDGEDGERWRTFVAWVQGNKAYRMAKRNRLLRKNYGVDESKGFIDRNLNDTRYICKFFKNYVEEHLQLAARADGDTARRCVVVNGQLTAFLRARWGLTKVRGDSDRHHALDAAVVAACTHGMVKALADYSRRKEISFLQEGFPDPETGEILNPAAFDRARQHFPEPWTHFAHELKARLFTDDLAALREDMQRLGSYTTEDLGRLRTLFVSRAPQRRSGGAVHKETIYAQPESLKQQGGVIEKILLTSLKLQDFDKLLNPESNDHFVEPHRNERLYAAIRQRLEQFGGRADKAFGPDNLFHKPDKNNQPTGPVVRSIKLVRGKQTGIPIRGGLAKNDSMLRVDIFTKAGKFHLVPVYVHHRVTGLPNRAIVAFKDEDEWTLIDESFAFLFSVYPNDYVKVTLKKEQQSGYYSGADRSTGAMNLWAHDRAASVGKDGLIRGIGVKTALSVEKFNVDVLGRIYLAPPETRSGLA

SEQ ID NO: 82 - protein, 1122 aa, Streptococcus suis
MSNGKILGLDIGIASVGVGVIDAQTGEIIHASSRIFPSANAANNAERRTFRGSRRLIRRKKHRIKRLDDLFNDFHINLDGEMSTDNPYVLRVKGLSQKLTVEELYISIKNIMKRRGISYLDDAESDNEAGRSDYAKAIERNRQLLTSKTPGEIQLERLEKYGQLRGNFTIIDEEGQSQQIINVFSTSDYVKEVEKILDCQKMYHKFISDEFCDKLIELLREKRKYYVGPGNEKSRTDYGIYRTDGTTLENLFGILIGKCTFYPDQYRSSRASYTAQEFNFLNDLNNLTVPTETKKLSQEQKEFLVNYAKETSVLGAGKILQQIAKLADCKVEDIRGYRLDNKDKPELHTFETYRAMKGLVPLVDIGVLSREQLDILADILTLNTDFEGIREALKKQLPNVFDEKQVKGLASFRKSKSQLFAKGWHNLSQKIMLEVIPELYATSDEQMTILTRLGKFEKSSVAEYPSSINVDEITDEIYNPVVAKSIRQTIKIINASIKKWGEFDQIVIEMPRDRNEDEEKKRIADGQKANAKEKADSILRAAELYCAGKVLPDYVYNGHNQLATKIRLWYQQGERCIYTGQPISIHDLIHNQNQYEIDHILPLSLTFDDSLSNKVLVLATANQEKAQRTPYNYLKSATSAWSYREFKDYVTKRKGIGKKKCEYLTFEEDINGFEVRSKFIQRNLVDTRYASKVILNALQDYFKISGIQTKVSVVRGQFTSQLRHKWGIEKTRETYHHHAVDALIIAASSQLRLWKKQESPLVVDYQEGRQVDLETGEILELTDEQYKELVYQPPYQGFVNTISSSAFDNEILFSYQVDSKVNRKISDATIYATRNAQLGKDKTEGIYVLGKIKDIYTQAGYEAFLKRYTKDKTSFLMYHKDLDTWEKVIEIILRDYREYDEKGKEIGNPFERYRRENGYVKKYSRKGNGTAIKSLKYYDNKLGNHIDITPENSRNAVVLQSLKPWRTDVYFNKETGKYEFLGIKYSDLSFEKGTGEYGISQEKYDSIKIAEGVAKKSIFKFTLYKQDLLFIKDIENNFGKLLRFTSKNDTSKHYVELKPYDKNKFGTEEPLLPVLGNVAKSGQCIKGLNKSNISIYKVRTDILGYRHFIKQEGEHPQLKFKK

SEQ ID NO: 83 - protein, 1509 aa, Bacteroides coprophilus
MKKTLGLDLGTNSIGWAVINSNIDSEGKEKLVGISSCGSRIIPMDATTLGDFGKGNTKSPVAERTRLRGIRRLLERSLLRRERLHRVLSVMGFLPEHYASQLDRYGKFLPETEPKLAWYKDDSGRYQFLFQKSFHEMLEDFRQHQPELVAGEKKIPYDWTIYYLRKKALSQEITKEELAWILLNFNQKRGYYQLRGEEEQEENNKSVEYHALKVVSVEDSGERKGKDIWYNVTLENGWVYRRASNIPLDWTGKVKEFVVTTELDDAGNPKKDKEGNVKRSFRAPKEDDWGLLKTRTQAQIDESGKTVGTYIYESLLCMPNQKIRGKLVRTIERKYYKDELRQILVKQSEFHAALQDHNLLLSCIEELYPNNEAHRRLLSASSFIYFLIEDILFYQRPLKSQKGLIDNCPYESHIYKDKKDGSLHHVPLKCVSKSHPLFQEFRLWQFLSNLRIYQRERMMDGSLKLDVDVTREFLPSEEDYVKLFDWLNERKEISQKFLLAYKPFGLKKNEQANYRWNYVEDKSYPCNETRAEIKSRLSKAGVPEEFLTEEKEEALWHILYSISDKKELTKALGTFAAKNCLNESFVEVFAKIPPFESNYAAYSLKAIRKLLALMRMGKYWNEQAIDRQTRDRIEKILTGEYDETIRSRVREKAMLLTDISSFRGLPLWLACYIVYDRHSESKELVKWETPADIDHFLSKFKQNSLRNPIVEQVITESLRTVRDIWKQEGKIDEIHVELGREMKNPAKERARITAQVQENENTNLRIKALLAEFMNPEFEIENVHPYSPGQQEILRIYEDGVLSGIAEKDLPDDITAILKKFRENDVKKRPTTSEVLRYKLWLEQRYRSPYTGRVIPLGKLFTPAYEIEHVIPQSRYFDDSISNKVICESAVNKLKDNCLGYEFIKKHSGEMVELGNGETVPVFSVEEYERFVKESYFGNSKKMKKLLLEDIPDSFIERQLNDSRYISRVVTSLLSNLVCEEGEQDGLSKNVIVCTGGITDRLKKDWGVQEVWNRIILPRFLRLNEITGRTDFTSTSVNGHLLPALPLYLQKGFNKKRIDHRHHAMDAIVIACANRNIVNYLNNSSARKNSEISRYDLQRLLCEKVKTDANGNYKWILRKPWETFTQDVYAALTNIVVSFKQNLRVINRTTNYYQHYNEAGEKRMIPQTKGDRWAIRKPMHKDTVYGEVNLRKEKTLPLRDVVKNPSIVVDKSLKNKLYELLKSQYDLKAIAKYFETHQDVWADVNLKKIKVYYFTKETNERFFATRKSLDPSFDQKKIEEEVTDTGVQKILLHHLQQNNNDPDMAFSPDGIDRMNQNMTILNDGKWHQPIYKVRTYEKADKFAVGESGNKAKKFVEAAKGTNLFFAVYESVQEDEAIGKQVCKRTFATIPLNEVIKRKKQGLPAAPEDLNGNLPKFVLSPNDLVYLPTEEERNSSRIIQPLDRERIYKMVSSSGSQCFFIKVFVANSIWDKNEYSSLNKMERAITNEMIKEICVPIKIDRLGNVSLIQI

SEQ ID NO: 84 - protein, 1219 aa, Bacteroides cellulosilyticus
MKEEVRGKNRSQTWAILAKFFVWSEKESVWNEKEARTEERVKEYKLVGLKRDTKGNELKLENYRWRVQALSEQLNPEIVAIVLQEINGQISASSGYLGAISDRSKQLYFNRQTVGQYLMSELEKDPNVSLRNRVFYRQDYLDEFDRIWEKQAEFHEELTVELKKEIRDIIIFYQRRLKSQKGLISFCEFEKREVVVEEDGRKKNKTVGCRVIPRSHPLFQEFKIWQTLNDIEVFAWDKQSKRKKADKSSILFDNSEDALLVEGKRFLYQEEKELLAKELFVKESMKKAEVLKLLFENYQELDLNFKQIDGNHTGFALFSAYSKMIEKYGYEPVDFKRSADEIIEKLETIFTNLGWNTELLSIDLSKEDKELERQSYFRLWHLLYSFEGDNTPTGNGKLLEKIMQLCDVEKEYAVELANVSFQEDYGSLSAKAIKKILPYLKEGNQYDVACDYAGYRHSRSSLTKDEIENKILKDKLEILPKNSLRNPVVEKILNQMVNLINTLIDTYGKPDEIRVELARELKKNAKEREELTKSIARNTREHDEIRQLLRTEFGMMNVSRNDIIRYKLYEELKDNGYKTLYSNEYIPREKIFSKEIDIEHVIPQARLFDDSLSNKTLEYRAINIEKGNKTAYDFVKEKYGNDGLEKFLNRCETLFKDKRTKLRKLKMEEKDIPEGFIDRDLRNTQYISKKAFAMLNEISRRVVATTGSITDKLREDWQLVDLMKELNLPKYEKLGMVEMFEDKDGRKIKKITDWTKRNDHRHHAVDALTVAFTKDVFIQFYNNKNAAWMPASKEHANITGIKARYFENGKALAPMPLAQFRAEAKRHLENLLVSIKAKNKVITSNVNRTKNKNGENRKLQQTPRGQLHLETVYGSHRQYATKIEKVNAAFDVTKIATVSKLAYRNALLKRLEAFGNDPKKAFTGKNTLEKNPLYLDENQTEMVPEKVQTVEFETVYTIRKPIDPNLSIDKVVDVKIRSVLEKRLKEYGGDAKKAFVNLDENPIWLNEAKGISIKRVSIRGISNAQSLHEKKDKDGNLILGKEGRKIPVDFVNTGNNHHVAIYKKPVLDKVGQVVLDEEGNPKYELDEVVVSFFDAVTRANLGQPIIDKDYRRSEGWQFLFSMKQNEYFVFPNDKTGFNPKEVDLLNPENYALISPNLFRVQKFAYKNYVFRHHLETTIKDTSSTLKGITWTDFRSSKGLDKIVKVRVDHIGQIVSIGEY

SEQ ID NO: 85 - protein, 1329 aa, Catenibacterium mitsuokai
IVDYCIGLDLGTGSVGWAVVDMNHRLMKRNGKHLWGSRLFSNAETAANRRASRSIRRRYNKRRERIRLLRAILQDMVLEKDPTFFIRLEHTSFLDEEDKAKYLGTDYKDNYNLFIDEDFNDYTYYHKYPTIYHLRKALCESTEKADPRLIYLALHHIVKYRGNFLYEGQKFNMDASNIEDKLSDIFTQFTSFNNIPYEDDEKKNLEILEILKKPLSKKAKVDEVMTLIAPEKDYKSAFKELVTGIAGNKMNVTKMILCEPIKQGDSEIKLKFSDSNYDDQFSEVEKDLGEYVEFVDALHNVYSWVELQTIMGATHTDNASISEAMVSRYNKHHDDLKLLKDCIKNNVPNKYFDMFRNDSEKSKGYYNYINRPSKAPVDEFYKYVKKCIEKVDTPEAKQILNDIELENFLLKQNSRTNGSVPYQMQLDEMIKIIDNQAEYYPILKEKREQLLSILTFRIPYYFGPLNETSEHAWIKRLEGKENQRILPWNYQDIVDVDATAEGFIKRMRSYCTYFPDEEVLPKNSLIVSKYEVYNELNKIRVDDKLLEVDVKNDIYNELFMKNKTVTEKKLKNWLVNNQCCSKDAEIKGFQKENQFSTSLTPWIDFTNIFGKIDQSNFDLIENIIYDLTVFEDKKIMKRRLKKKYALPDDKVKQILKLKYKDWSRLSKKLLDGIVADNRFGSSVTVLDVLEMSRLNLMEIINDKDLGYAQMIEEATSCPEDGKFTYEEVERLAGSPALKRGIWQSLQIVEEITKVMKCRPKYIYIEFERSEEAKERTESKIKKLENVYKDLDEQTKKEYKSVLEELKGFDNTKKISSDSLFLYFTQLGKCMYSGKKLDIDSLDKYQIDHIVPQSLVKDDSFDNRVLVVPSENQRKLDDLVVPFDIRDKMYRFWKLLFDHELISPKKFYSLIKTEYTERDEERFINRQLVETRQITKNVTQIIEDHYSTTKVAAIRANLSHEFRVKNHIYKNRDINDYHHAHDAYIVALIGGFMRDRYPNMHDSKAVYSEYMKMFRKNKNDQKRWKDGFVINSMNYPYEVDGKLIWNPDLINEIKKCFYYKDCYCTTKLDQKSGQLFNLTVLSNDAHADKGVTKAVVPVNKNRSDVHKYGGFSGLQYTIVAIEGQKKKGKKTELVKKISGVPLHLKAASINEKINYIEEKEGLSDVRIIKDNIPVNQMIEMDGGEYLLTSPTEYVNARQLVLNEKQCALIADIYNAIYKQDYDNLDDILMIQLYIELTNKMKVLYPAYRGIAEKFESMNENYVVISKEEKANIIKQMLIVMHRGPQNGNIVYDDFKISDRIGRLKTKNHNLNNIVFISQSPTGIYTKKYKL

SEQ ID NO: 86 - protein, 1152 aa, Roseburia inulinivorans
MNAEHGKEGLLIMEENFQYRIGLDIGITSVGWAVLQNNSQDEPVRITDLGVRIFDVAENPKNGDALAAPRRDARTTRRRLRRRRHRLERIKFLLQENGLIEMDSFMERYYKGNLPDVYQLRYEGLDRKLKDEELAQVLIHIAKHRGFRSTRKAETKEKEGGAVLKATTENQKIMQEKGYRTVGEMLYLDEAFHTECLWNEKGYVLTPRNRPDDYKHTILRSMLVEEVHAIFAAQRAHGNQKATEGLEEAYVEIMTSQRSFDMGPGLQPDGKPSPYAMEGFGDRVGKCTFEKDEYRAPKATYTAELFVALQKINHTKLIDEFGTGRFFSEEERKTIIGLLLSSKELKYGTIRKKLNIDPSLKFNSLNYSAKKEGETEEERVLDTEKAKFASMFWTYEYSKCLKDRTEEMPVGEKADLFDRIGEILTAYKNDDSRSSRLKELGLSGEEIDGLLDLSPAKYQRVSLKAMRKMQPYLEDGLIYDKACEAAGYDFRALNDGNKKHLLKGEEINAIVNDITNPVVKRSVSQTIKVINAIIQKYGSPQAVNIELAREMSKNFQDRTNLEKEMKKRQQENERAKQQIIELGKQNPTGQDILKYRLWNDQGGYCLYSGKKIPLEELFDGGYDIDHILPYSITFDDSYRNKVLVTAQENRQKGNRTPYEYFGADEKRWEDYEASVRLLVRDYKKQQKLLKKNFTEEERKEFKERNLNDTKYITRVVYNMIRQNLELEPFNHPEKKKQVWAVNGAVTSYLRKRWGLMQKDRSTDRHHAMDAVVIACCTDGMIHKISRYMQGRELAYSRNFKFPDEETGEILNRDNFTREQWDEKFGVKVPLPWNSFRDELDIRLLNEDPKNFLLTHADVQRELDYPGWMYGEEESPIEEGRYINYIRPLFVSRMPNHKVTGSAHDATIRSARDYETRGVVITKVPLTDLKLNKDNEIEGYYDKDSDRLLYQALVRQLLLHGNDGKKAFAEDFHKPKADGTEGPVVRKVKIEKKQTSGVMVRGGTGIAANGEMVRIDVFRENGKYYFVPVYTADVVRKVLPNRAATHTKPYSEWRVMDDANFVFSLYSRDLIHVKSKKDIKTNLVNGGLLLQKEIFAYYTGADIATASIAGFANDSNFKFRGLGIQSLEIFEKCQVDILGNISVVRHENRQEFH

SEQ ID NO: 87 - protein, 686 aa, Coprococcus comes
MKKQDSPKNNMGYTAYNLNVLGYEEFAKRVELLFKDTDAVKRLNDSHMQMAEGFDLNALPGSPALRRGVSQAIKVLDDIVSVAGKAPDRIYLKVTRTASNSRKGKRTAKRSDKIKQALKALDADAAADLGAAKLLRELGMFDEKEINERIYLYFHQAGKCLYTGKPIDITRIASNDYYVDHVVPLAYRKDESLDNKVLVYAEASRYKSETLLVSPAVQRKMLPFWRMLRNAGLMSERKLNALIRTEISEGMLKSIIGRQFTENSWEAKLFTAAIAAKYPGTVVIPVKAGVIGAVRSRIGIPKSLKANQFYHAHDALLAAEVGRYMELAKPAFVHNRVKYEQYMRKIKLVNEENKKAPKSQLDFFAGGFFFDRVDKDTGEVYWNKDEEVERIYRACGWKNLRVTYAAFEDGGAFWKQTIYSPREKSKLIATKSDRPAEIYGGYSSQTFANFFVYEVMKKKVKQLRFGAVPAAIASKSDPDTYNAMLEMYARGLAKTAKEKFVRIVRARVLKNTMIELYGERFRIAGEKQVYPVRQMPLAIDEVYLLKGVETIAAAGNAGASAKIDFEKAAESLVGFWDLLLEKLPVNYPKLTVQLKLGLLKHPKDILAATSESEFPAIVYKIAEAEIQVMEQASGLRNMSDTKILGGNTFGGSLVFTFNKVLNDPKSKACFIDTTPAGLYEVKTKIW

SEQ ID NO: 88 - protein, 1105 aa, Actinomyces coleocanis
MDNKNYRIGIDVGLNSIGFCAVEVDQHDTPLGFLNLSVYRHDAGIDPNGKKTNTTRLAMSGVARRTRRLFRKRKRRLAALDRFIEAQGWTLPDHADYKDPYTPWLVRAELAQTPIRDENDLHEKLAIAVRHIARHRGWRSPWVPVRSLHVEQPPSDQYLALKERVEAKTLLQMPEGATPAEMVVALDLSVDVNLRPKNREKTDTRPENKKPGFLGGKLMQSDNANELRKIAKIQGLDDALLRELIELVFAADSPKGASGELVGYDVLPGQHGKRRAEKAHPAFQRYRIASIVSNLRIRHLGSGADERLDVETQKRVFEYLLNAKPTADITWSDVAEEIGVERNLLMGTATQTADGERASAKPPVDVTNVAFATCKIKPLKEWWLNADYEARCVMVSALSHAEKLTEGTAAEVEVAEFLQNLSDEDNEKLDSFSLPIGRAAYSVDSLERLTKRMIENGEDLFEARVNEFGVSEDWRPPAEPIGARVGNPAVDRVLKAVNRYLMAAEAEWGAPLSVNIEHVREGFISKRQAVEIDRENQKRYQRNQAVRSQIADHINATSGVRGSDVTRYLAIQRQNGECLYCGTAITFVNSEMDHIVPRAGLGSTNTRDNLVATCERCNKSKSNKPFAVWAAECGIPGVSVAEALKRVDFWIADGFASSKEHRELQKGVKDRLKRKVSDPEIDNRSMESVAWMARELAHRVQYYFDEKHTGTKVRVFRGSLTSAARKASGFESRVNFIGGNGKTRLDRRHHAMDAATVAMLRNSVAKTLVLRGNIRASERAIGAAETWKSFRGENVADRQIFESWSENMRVLVEKFNLALYNDEVSIFSSLRLQLGNGKAHDDTITKLQMHKVGDAWSLTEIDRASTPALWCALTRQPDFTWKDGLPANEDRTIIVNGTHYGPLDKVGIFGKAAASLLVRGGSVDIGSAIHHARIYRIAGKKPTYGMVRVFAPDLLRYRNEDLFNVELPPQSVSMRYAEPKVREAIREGKAEYLGWLVVGDELLLDLSSETSGQIAELQQDFPGTTHWTVAGFFSPSRLRLRPVYLAQEGLGEDVSEGSKSIIAGQGWRPAVNKVFGSAMPEVIRRDGLGRKRRFSYSGLPVSWQG

SEQ ID NO: 89 - protein, 1361 aa, Anaerococcus tetradius
MGNYYLGLDIGTNSVGWAVTDENYNIERFKKKNMWGIRLFDEAKTAESRRIHRQARRMRQRKIQRLNLLMELFDVEISKVDESFFIRKKESDLHYEDKSQDSRYALFNDKEFNDKDYHNKYPTIFHLIMDLIENDEKKDIRLLYLACHYLIKNRGHFIFEGQKFDVNSSLNNNINKLKSHLDQFYNICLDFDNDKLIEILVNQNLNISEKSKKIKELLRKTNLEVGIANLIAGGSIKLSNMFDDDELKNLDYNSLSFKNSNFDEGRELFEEVLEDRFELVEILKDIHDASVLETMLSSASISPDGGKYISSSMINSYNKHKRDLKLLKKIIKKYKKSEYDNIFRDENIKNNYLSYTRTGINKNKKVQAEDNTDSDGFYKYIVKILKDIKENDSDEDIKYILSEIDKKNFVPKQRTKENSVIPYQLREIELRKIIDNQSKYHKFLNEVDEKGISVKEKIISLLTFRIPYYIGPLNPSYNEEKNFTTSWVKRLAKGKVTPWNFEDMVDIDASREAFIENKLNKCSFLLDETVLPKDSLLYQEYMVLNELNNLKINGQSINTDLKKSIYEELFKKYKKVTRKRLISYIKEKENMSGDIVITGIDGDFKQGLKSYIAFKDIIGEKIDDDIYRKEVEKIIRDISLYGDDKSFIQKKIKNENKLDLSDDQISKIAKLKFKDWGRFSKKLLVGIKASDKNTGEIDNIIGFMRNYNYNIMQLMANVFTFKDEIEKLNSKYYTDEKINIDYLDDLYLSSPAKRMLWQSFQIVDEIKNIKNSDPKKIFIEMARSKEDKPTRKMSRKSRLEKLYTDSKKQFIKLFGPDEYDKLNNEIKNKSESDFRWDNLYLYYTQFGRCMYSLDPIDLEELSNKNLYDQDHIYPKSKIYDDSIENRVLVKKQLNLDKSNEYPIPDRVLNKDKNKLLAFWKMLNEKELIGDKKYARLIRKSPFTDEELGDFIARQLVETRQATKETANMLKRLCPDSKIVYVKAKNVSDFRRKFDILKCRSINDLHHAHDAYLNIVVGNVFDTKFTSNPLNFIKNNSKNRSYNLEKIYDYDVIRNEKIAWLAERKEENQDGSIATVLKNLSKNDIRVTRRTYIKCEDLFDENIVRKGNGKFPIKENNNKSDTNKYGGYSGIKNAYFVLLEDEKHNRILEAIPSFIYKKEKNGEKGSVINYLQNILGIKSAKILRDKIKIGSLLKIDKFPYNLAGKSGNGILISGGVQLILDKNTSKYIKKIENYKYKLDENKDYQINIFDKLSKEENIKLFDLFVDKFENSIYKNRVNIKLKEIKLARPKFEHLSIEEQIKTLTQMLILFGRENNAVNLEYIGLPKNTGKTKINKKINNKDIKIINQSITGLYETEEDLANI

SEQ ID NO: 90 - protein, 1377 aa, Lactobacillus brevis
MESNHDGEQVKYTLGLDIGTSSIGYAAIDKHQKPIRAKGKHVIGVRLFQEGQTAADRRAFRTTRRRLKRRKWRLNLLNRLFDPYLSEVDPNFLPRLRQSNLSPKDDNKHFNGSTLFPDKTDAAFYRQYPTMYHLRYALMTEKRKFDIREVYLAIHHIVKYRGNFLNSATVDSFKTSNIDFTSQFDRLNELYRQVILDEPFQINMDQVDEMTNKLLDNDALKLDTQKQVAKLLPVIYNDKPIDKQYTRIATEFSKAILGYKTKLDVILNLDTQNAKDWVIRLDDEDIDDKLPALVENLDESRQEIVTIIRDLYAQITLNAIVPKGKSLSESMVDKYNDHKDHLDLLMGLIHELGDDSAKGIKLREAYTQYVGKSDDKTLNQDDFYAAIKKNLDEDSKRSPKIQRLIEQASFMPKQRTSANGVIPHQLHQLELDRIIENQGRYYPFLKKPNPNTHKPNGGKYKLDELVAFRIPYYVGPLITKRDQEKTSGADFAWMIRKPGQEGEITPWNFDQKVDRMASANRFIRRMTTKDSYLVAEDVLPDASLIYEKFKALNELNMLKVNDSRLSPSQKQDLFNNLFKKQKTIRTKKLQTYIRTNWELPSVMISGLADPDKFNSSLSTYIDFRDIFGEKVDDPNRQADYEEIIEWSTVFEDRKIYQAKLNQLDWLTEPQRKALLTKRYTGWGRLSKKLLTGLKDQNGDSILDQLWKTNDNFMQIQSRDEFAKQIHDENAKQFHEANNVDDILDDAFTSPQNKKAIRQVDKVVQDVVKAVGYAPDKIAIEFTRSLENNPQRTVSRQRQLQAAYKNIPREIMKSGLMAELGSVADSKKVLSDKLYLYFTQMGKDMYEDKTINIDNLPNYDIDHILPQAFIKDDSIDNRVLISKEENARKSNRVPLKFFGAKRMGFWKDLLNNGLISNRKFQNLTTDPEKISKYSAKGFIHRQLVETSQVIRLVANILGNEYSQAGTTIIEVSAKMNRQLREDFHLIKNRNVNDYHHAMDAYLTAYVGDYLYLRYPKLRPYFVYGDFKKAEDQDLNIRNFNFLHDLKDNESLDKIVDSETGEIVWEKHGSVKQLKKVYHYKFMLVSQEVYTRQDALFNQTIYPASDADKRKLIPIKNSKPVDVYGGYSGNIDAYMAIVRVHGKKEDNYKVVGIPMRAVTKLKKAEKEGHDSYLNAVHEVLKPQFTKKKKNRKTGEITETVDEFDVLLGKVYYRQLIVDGNKKFMLGSSSYQYNAKQLVLSDKAMQVLSKNGKVKSQDENQNLIDVYDEILEKVDQYFELYDQRHYRESLHKGRGIFVNLPLSNQYDGSKLTSYGKYETIDAILNGLHANATMSNLRYLGISSPFGKMQASNGLTIDPDSIICYQSPTGLFERQIKLSDL

SEQ ID NO: 91 - protein, 1239 aa, Lactobacillus buchneri
MTEKRKFDIREVYLAIHHIVKYRGNFLNSATVDSFKTSNIDFTSQFDRLNELYRQVILEEPFQINMNQVDKMTNKLLDNDALKLDTQKQVAKLLPVIYNDKPVDKQYTRLATEFSKAILGYKTKLDVILNLDTQNAKDWAIRLDDEDIDDKLPALVENLDESRQEIVTIIRDLYAQITLNAIVPKGKSLSESMVDKYNDHKDHLDLLMGLIHELGDDSAKGIKLREAYTQYVGKSGDKTLNQDDFYAAIKKNLDEDSKRSPKIQRLIEQASFMPKQRTSANGVIPHQLHQLELDRIIENQGRYYPFLKEPNSNTHKPNGGKYKLDELVAFRIPYYVGPLITKQDQEKTSGADFAWMIRKPGQGGEITPWNFDQEVDRMASANTFIRRMTTKDSYLVAEDVLPDSSLIYEKFKVLNELNMLKVNDRRLSISQKQDLFNNLFKKQKTIRTKKLQTYIRTKWELPSVMISGLSDPDKFNSSLATYIDFRDVFGEKVDDPNRQADYEKIIEWSTVFEDRKIYQAKLNQLDWLTESQSKALLTKHYTGWGRLSKKLLTGLKDQNGDSILDQLWKTNDNFMQIQSRDEFAKQIHDENAKQFHEANNVDDILDDAFTSPQNKKAIRQVDKVVQDVVKAVGYAPDKIAIEFTRSPQDRPQRTFSRQRQLQSTYLNVAKALMKSNLNQELKSVIDSQQTLTDKLYLYFTQLGQDMYTGKEINFDELVNYQIDHILPQAFIKDDSLDNRVLVSAPINNAKSDNVPVKKFGAKMGYFWKQLAENHLISKRKLNNLTTDPDKIGKFTAQGFIHRQLVETSQVIRLVANILGNEYGHDGTTIIEVTAKMNHQMRKDFDLIKIRDVNDYHHAMDAYLTAYVGDYLYLRYPKLRSYFVYGDFKKLKDQSLKIRNFNFLHDLTNDEAGDKIVDQETGEIIWDKHESVKQLKKVYHYKFMLVSQEVYTRQDALFNQTIYPASDADKRKLIPIKNNKPVDVYGGYSGNVDAYMAIVRIHGKKEDKYKVVGVPMRAVADLKKAESKGRDNYLNAVHEVLKPQFTKKKKDRKTGEITEMMDDFDVLLGKVYYRQLIVDGNKKFMLGSSTYQYNAKQLVLSDKAMQVLSKDDKLKNQDENQNLIDVYDEILEKVDQYFELYDINKFRQKLHDGRKKFIELPVDNDFNGKKLISYGKRATIISILNGLHANATMSNLKYLGISSPFGMLQVPNGIILSPASRICYQSPTGLFERKVKLSDL

SEQ ID NO: 92 - protein, 1381 aa, Lactobacillus fermentum
MDYVKEYHIGLDIGTSSIGWAVTDSQFKLMRIKGKTAIGVRLFEEGKTAAERRTFRTTRRRLKRRKWRLHYLDKIFAPHLQEVDENFLRRLKQSNIHPEDPAKNQAFIGKLLFPDLLKKNERGYPTLIKMRDELPVEQRAHYPVTNIYKLREAMINEDRQFDLREVYLAVHHIVKYRGHFLNNASVDKFKVGRIDFDKSFNVLNEAYEELQNGEGSFTIEPSKVEKIGQLLLDTKMRKLDRQKAVAKLLEVKVADKEETKRNKQIATAMSKLVLGYKADFATVAMANGNEWKIDLSSETSEDEIEKFREELSDAQNDILTEITSLFSQIMLNAIVPNGMSISESMMDRYWTHERQLAEVKEYLATQPASARKEFDQVYNKYIGQVPKEKGFDLEKGLKKILSKKENWKEIDELLKAGDFLPKQRTSANGVIPHQMHQQELDRIIEKQAKYYPWLATENPATGERDRHQAKYELDQLVSFRIPYYVGPLVTPEVQKATSGAKFAWAKRKEDGEITPWNLWDKIDRAESAEAFIKRMTVKDTYLLNEDVLPANSLLYQKYNVLNELNNVRVNGRRLSVGIKQDIYTELFKKKKTVKAGDVASLVMAKTRGVNKPSVEGLSDPKKFNSNLATYLDLKSIMGDKVDDNRYQMDLENIIEWRSVFEDGEIFADKLTEVEWLTDEQRSALVKKRYKGWGRLSKKLLTGIVDENGQRIIDLMWNTDQNFMQIVNQPVFKEQIDQLNQKAITNDGMTLRERVESVLDDAYTSPQNKKAIWQVVRVVEDIVKAVGNAPKSISIEFARNEGNKGEITRSRRTQLQKLFEDQAHELVKDTSLTEELEKAPDLSDRYYFYFTQGGKDMYTGDPINFDEISTKYDIDHILPQSFVKDDSLDNRVLVSRAENNKKSDRVPAKLYAAKMKPYWNQLLKQGLITQRKFENLTMDVDQNIKYRSLGFVKRQLVETRQVIKLTANILGSMYQEAGTDIIETRAGLTKQLREEFDLPKVREVNDYHHAVDAYLTTFAGQYLNRRYPKLRSFFVYGEYMKFKHGSDLKLRNFNFFHELMEGDKSQGKVVDQQTGELITTRDEVAKSFDRLLNMKYMLVSKEVHDRSDQLYGATIVTAKESGKLTSPIEIKKNRPVDLYGAYTNGTSAFMTIIKFTGNKPKYKVIGVPTTSAVGLKRVGKPGSESYNQELHRIIKSNPKVKKDFEIVVPHVSYSQLIVDGDCKFTLASDTYQHPATQLVLSKESMEIIADDFKFVKENPATADEQLVRVFDEIVNQMNHYFTIFDQRSNRQKVTKARDKFVSLPTESEYEGAKKTQVGKTEVITNLLMGLHANAAQGDLKVLGLSTFGFFQSSGGLNLSEDAMIVYQSPTGLFERRICLKDI

SEQ ID NO: 93 - protein, 1306 aa, Sphingobacterium spiritivorum
MKHILGLDLGTNSIGWALIKQNFENKQGEILGMGSRIIPMGAELSKFEQGQAQTKNANRRIARGTRKLNKRYKQRRNKLIYILQGLGMLPDQIKLVNQFSDPNKLDKISILPISKNQQQLTAFDLLELRVKALTEKIELEELGKVIYKYNQLRGYSGGNSEPEKEENNEDESEENEKTNDSFVVFSKVLSLGLPEEITFKGKKLSKRKIAIETEDGIIEAETFLDSLKENDSLELHVNIRRAKSGDTITIKLPSKTSWRKKMENIEKQLADKSKELGREYFISELLFDILKENKWAKIRNNVILRSRYESEFDAVWSEQSKYYPILNHLETDRLQKILEFIFPGQKESQEKLRQTGLKEGLKYVIKNQVVFYQRELKDQSDLISNCRYEPTEKVVAKSHPVFQEYKIWEQINKLVINTKIENGVNRKGEIRYKYIDKPIPVALKEWLYEELQSKKEVSFNPILTKLKKEFKLRENVDFLNGMNAKDKLKGNETKVILQKALGELWNIFGLDDSERQVELWEILYNGKGNEYDLTSERTSNILAFIEKYSPDLENKNDVAIKISKIKFSRNYSNLSLKAIDNILPLVRAGKFFDQNFSEALSHKIVKLLNENVEDPFEKSAQEFLDKNQDVLSDGGIVNAIATILVYDKHTAKEYSGDELIKEFTQISRLKQGELRNPLAEQIINEALVIVRDIWRKYGFKPDEIRVELARELKNNAVERGKMYSANLKSQKHNAEIRNKLIELKQEISIANIEKYKLWVSQENLQEVYLKNYNDPSKSEIEKLKLWESQGHISPYTGQPISLSELFNRERYDVDHIIPQSRYFDDSLSNKVICEKSINNEKGNRTSMEYFEVGSVNYRIFTKDQFIDHANKYFSGKKRKNLLATSIPEDPIQRQIKDTQYISIRIREELNKIVGNENVKTTTGGITDYLRNHWGLTDKFKVLLKERYEAVLPKIAQLEYDNYKKETEKKFTEYKNADVEFNEPILDEEIFIEKFRSEFIRKKNNKLIIKGWSKRIDHRHHAMDALVIACTQPAHIKRLNDLNQVLKEWLDKNKEKFFPGFSGTKTELLDEVLNLEEEKRREIFNQLEKFRAIEMPWKGFPEEAEQKLKEVIVSHKPKDKLLLQYDIQGNKQIKLRGQLHEGTLYGLSNGKEIYRIPINKLAGKQFATEKTIEKIVNPFLKNVIEEHLKSFGKKEEAFSAEGILDLNKKLAERKDEQQNPKPHPPISTIKIYYKDPSKSKKKKTDDEDDISLQKLNRKKSFNDSLYVKTGDNYLFAVMEKEVFNKKLNKDKTERHYDLKLFLTLLIF

SEQ ID NO: 94 - protein, 1358 aa, Acidaminococcus sp.
MGKMYYLGLDIGTNSVGYAVTDPSYHLLKFKGEPMWGAHVFAAGNQSAERRSFRTSRRRLDRRQQRVKLVQEIFAPVISPIDPRFFIRLHESALWRDDVAETDKHIFFNDPTYTDKEYYSDYPTIHHLIVDLMESSEKHDPRLVYLAVAWLVAHRGHFLNEVDKDNIGDVLSFDAFYPEFLAFLSDNGVSPWVCESKALQATLLSRNSVNDKYKALKSLIFGSQKPEDNFDANISEDGLIQLLAGKKVKVNKLFPQESNDASFTLNDKEDAIEEILGTLTPDECEWIAHIRRLFDWAIMKHALKDGRTISESKVKLYEQHHHDLTQLKYFVKTYLAKEYDDIFRNVDSETTKNYVAYSYHVKEVKGTLPKNKATQEEFCKYVLGKVKNIECSEADKVDFDEMIQRLTDNSFMPKQVSGENRVIPYQLYYYELKTILNKAASYLPFLTQCGKDAISNQDKLLSIMTFRIPYFVGPLRKDNSEHAWLERKAGKIYPWNFNDKVDLDKSEEAFIRRMTNTCTYYPGEDVLPLDSLIYEKFMILNEINNIRIDGYPISVDVKQQVFGLFEKKRRVTVKDIQNLLLSLGALDKHGKLTGIDTTIHSNYNTYHHFKSLMERGVLTRDDVERIVERMTYSDDTKRVRLWLNNNYGTLTADDVKHISRLRKHDFGRLSKMFLTGLKGVHKETGERASILDFMWNTNDNLMQLLSECYTFSDEITKLQEAYYAKAQLSLNDFLDSMYISNAVKRPIYRTLAVVNDIRKACGTAPKRIFIEMARDGESKKKRSVTRREQIKNLYRSIRKDFQQEVDFLEKILENKSDGQLQSDALYLYFAQLGRDMYTGDPIKLEHIKDQSFYNIDHIYPQSMVKDDSLDNKVLVQSEINGEKSSRYPLDAAIRNKMKPLWDAYYNHGLISLKKYQRLTRSTPFTDDEKWDFINRQLVETRQSTKALAILLKRKFPDTEIVYSKAGLSSDFRHEFGLVKSRNINDLHHAKDAFLAIVTGNVYHERFNRRWFMVNQPYSVKTKTLFTHSIKNGNFVAWNGEEDLGRIVKMLKQNKNTIHFTRFSFDRKEGLFDIQPLKASTGLVPRKAGLDVVKYGGYDKSTAAYYLLVRFTLEDKKTQHKLMMIPVEGLYKARIDHDKEFLTDYAQTTISEILQKDKQKVINIMFPMGTRHIKLNSMISIDGFYLSIGGKSSKGKSVLCHAMVPLIVPHKIECYIKAMESFARKFKENNKLRIVEKFDKITVEDNLNLYELFLQKLQHNPYNKFFSTQFDVLTNGRSTFTKLSPEEQVQTLLNILSIFKTCRSSGCDLKSINGSAQAARIMISADLTGLSKKYSDIRLVEQSASGLFVSKSQNLLEYL

SEQ ID NO: 95 - protein, 653 aa, Oribacterium sinus
MELINSEEFTFKEELEKHTQVAMKQLSEFTYEDLEDSYFSVPVKRMIWQTLLVVREIEKVMGYAPKRIFVEMTRTEEEKGDKGRKESRGNQLLELYKSIKNTDSHNWKEEIAAADKDGKLRSKKLFLYYMQMGRDMYTGEEIDLGRLYDDNLYDIDHIYPRHYVKDDSIMNNLVLVNRRANQDIKKDLYPIPEQIKANPNVHMLWDALHKQKLITDEKYARLTSNTAFSEKQLGDFIARQLVETGQGTKGVADLLEQLFKDTVIVYAKASNVSDFRRDNGFLKSRLVNDFHHAQDAYLNIVVGNVYYTKFTKNPWNFICKDYEKDKEKNRYNLARMFDWNVVRGSETAWIVERKDEKGTISTVRKMMQKNTPLLTRMNFEQHGSIANATLYSAKKAKSENYLPLKTADEKMSDVKKYGGYTSMSIAYYFIVHHKEDKKENVTIEALPLYCKDKVEREENGLEKYCEEVLGYGEVNIIRRKLKIQSLLEFNGYQVHLSGKTGNQLILRNAISLCLSTKWITYIKKLEKAVNIQIVEEVVTPEENIKLYNLLADKHANTVYSKRPNAYGEKLLADREIFVTLEFGKQCEALLQILSLTKIGSTEANLLLIGESEHSGKILISKNLKASDRPAVINQSPCGLYEKKEWIFDKIVEK

SEQ ID NO: 96 - protein, 1436 aa, Capnocytophaga gingivalis
MKYIKYILGLDIGSNSIGWALIQLDLLQKTKRIIAAGSRIIPMDQKVLSDFGKGITISPTAQRTSYRNARHCRERHLLRRERLHRVLHILGFLPTHYDKQIDFSKRYGKFVDNTEPKIAYNEGKFLFMDSFQEMLSDFKSHQPDLFYTKKNGEESKIPYDWTIYYLRKKALSQKISKEELAWIILNFNQKRGYYQLREEEGNKENDFEIISSKIISVIKKDKDKKYNKYWYDIILENGLVYQAAFYNDFVYNWINQDREFIIERTSLKNGAEKVKLSYLPTFDEIDKMDKKEQDKYYKKIKIKTENSIGNKTVGCYIYDHILQNPNEKIKGKLVRTIERKYYKEELKAILEKQIALQPELFTDQLLADCIRELYSKNEAQQRNLAARDFVHLLVEDIIFYQRPLRRQKSTLANCSLESRSYIDKDSHTRKEAPLKVCPKSNPYYQEFRVLQWLQNLKIYEIDSDQEVTHQFIKTLEDKQQLFEFLMAQKEIDCEELLKYFLNQTYPNAKEKALKSELKKWKDTYRWNYVYDIGEKSSKKYPMNETRYELKRHLEKVANLPDDFLSSEVEYLLWHLIYSVKDKVAYEKGLKKFAQKHHLDKDSFVESFKKFNPYPSEYGSFSEKAIRKLLPLMRFGAHWDFNHIDKNTQKRIEDLITGVENEEIRTILREKAEKYQLEKETDFQDLPLWLAQYIVYNRHAEASSLEKWTSVNDLETYLNEFKQHSLRNPIVEQVVMETLRVVRDIWQQYGQGQASFFNEIHIELGRELKKTAKEREKLSKQNQKNEDINLSIKEKLKELEKYNTRAYSITHQEKYKLWLEQKHISPYTGQIISPENLFTDNYEIEHIIPQSRFFDDSLSNKVVCESIVNKAPYKDRQLGLEFIKNQGGRIVKELSKENKTIKIFTEEQYRTFIKEHYSNNPEKTKKLLLEEIPEKMVARQMNDTCYISKFISEILSKIVRSDEQDEGVHSKNVILCTGKITSILRQDWGLNDIWDNLILPRFERMNNLLQKEKFTIYSIEKQKKIPVVPINDQFKSFQKKRIDHRHHAMDAIIIACTTREHINYINNQHALEKEKDKKEKQEERDKLREKLCIKKYNNRSEGNYSWIFKKPWDTFTQEVRVALEDIVVSFKQNLRVINKATNYYERWVEENGKYIKKMVKQEGTNWAIRKPLHEETISGKIYLDREKITKNDILTATRKTVDSSFDDKRIKKITDTGIQKILLNYLKYKGSPEIAFSPEGLEELNKNLSIYNDGKPHKPIYKVRIYEKGSGRFALGEKGRKYKKYVQGASNLYFGIYQGAKRSFATIPLNEVIERQKQGLPSVPEYNEKGDLLLFSLSPNDLVYVPIEGEIIENIDFRNLSKEQKERIYNVNDFSSTCYFTPNRIAKAIFPKEVDLQRKGDKLSGSYDTKTASLEGIQIKEVCIKLKVDRLGNISKA

SEQ ID NO: 97 - protein, 1069 aa, Bacillus cereus
MNYDIGLRIGITSCGWSIINKDLERIEDLGVRVFEKAENPDGTASAAPRREARKSRRKHRRKKHRIERIKRLIVQHDLLSKKELDSLYLSPFNIDVWNLQVEALERKLDNREFARVLIHLVQRRGFQTIRKSVEIQEEGKLLENVSENERIMKVNGYKTVGEMFSKHEKFTHHKRNKDGSYTSVVTRSLLLKEIKTIFNSQRILGNVFSTQKLESDYLYIWGSQRPTLTYEQLMSMVGNCIYEKKEKRAPKTSWAFQYFSLLQKINKLKVSDDNTLRKLSKEERDIVIELAFKKKNVSFVDIRKALKLNDNTKFNHLTYSHVVETKKVEKATFIELKGYHLIKKQLKDRNVELTQELQPKDYDAIAAASTFFKNDIEFRDYLRNQYLDSNGKRKSNIANKVFEDKVIAAVFELNFSKVCHLSFKSLYKLIPHLEKGLDYKEAILCAGYNFRDENKRDKKLFLPVIQQETNPVVHRALTQARKVINAIIREYGSPNTIRFVVANDLAKTYKQRKELESTLKKNRAENEKIKTKLLSMGIINPTGMDIVKYKLWYEQSGICLYTGRQMELSSLFKPGYSIVNHIIPYNRSFDDTYHNRVLTLTETKYEKGNKIPFEYFGAEETCWNEYEKRVSTSKKIHDKKREKLLIRNFDIEYENEMISNNVFDTHYIGSYFEKYIDEHLQFKKSTKKQKVFSIHGNMVAHLHSRWGFNKNSREIYLNHAVDAAIVAVLTDQLIRNIADYYRRDNILEQKGSLKFPEPWKSFSIELEARISPQVRDLIKKLNLDSYLDVDILHIKPVFISKKPRRKVNGEAHKSTIRSLIGINEIGKTVTCIKTRLEDIPFDENGDFPMYGKDTDKYTYTAIKERYLEFNKDKEKAFSTPLYKLKRNGEPGNQIKSVKIIDTRNIVNKVNQGKGIAYNSNIIRVDVFSRDQKYYVVPIYLRDFIKGSLPNKIITAAKGFMQWPETDNSYTFLFSIFPNDLIKVVPKEGKFIKAKNENKENINLTEILGYFKGLDSSTGAFTLESHDGSLLARGIGTKNLLLIEKYQVDVLGRYNKVGNEERQDIKIQQN

SEQ ID NO: 98 - protein, 1391 aa, Lactobacillus jensenii
MKEIKDYIIGLDIGTNSCGYVVTDKQNNILKLKGKTAIGARLFKEGEAAADRRAFRTTRRRLARRRWRLSLLEEIFDEEMNKVDPSFFRRLKESDYSPKDRRKQFNSIVFESSEADKAFYEKYPTIYHLRNALMHDNQKHDLREIFLAVHHIVKYRGNFLREDSVKAFKAAKFTLQGEDGIGPVDKLNDLLKEIYIEAAPELATDNLSKIEDIIKDKKLYKQDKLKQIANLLPKAVDSKDKAKLNKDIAKQVANALMGYMFRLDTLFSFTDVDVKDYKLKFSDANIDESLDALTSLLTDAQIEFVLELQSIYNTIVLNEIVPDGMSLSESMVKKYDDHKKDLKLYKEYIDSLSDQKKAKQLEAAYALYVNYRKADLLAAKKLFEKKKIGDKKFVDVISNFEVFGKFVSDNLDDSELANKIKARLDLGEFLPKQRTNQNGVIPYQLHQVELTQILEKQGKYYPFLITPNPVESHRNNAPYEISELVSFRVPYYVGPLIDNQSIKDKQNKNKFAWMVRQKQGQITPWNFEEMVDTTESANQFIKRMTRKDTYLLAEDVLPKSSLIYQKFMILDELNRIKIDGKKLTSKLKHDIFEKLFKKQKSINLDNLKNYLLAEGNIPGLIEGLSDGINFNNSFSTYIDYRNIFGDEIDNPNKQADFEKMIEWSTVFEDRKIFKRKLKEITWLTPEQIKQVSSKRYSGWGRLSKKLLTQITDENGVNILQRLWNEPETLTEVLANPVIKRKISEANSLFVQINKVENILDDAYTSPQNKKAIRQVIRVVDDIIAAAHGKKPSQIAIEFARSSQNKAKVPDTRKKQLDKIYNKISSEILDSSIKNELKNLKSNKYLSKDKLFLYFKQMGRDAYTGDKLSLDQLQNYDIDHIFPRSFIKDDSLDNRVLTQKPINAKKSDYGIPALEFGNKYVPDLGITVKEMWKLWQENGLISKSKLINLCTNPKKIGSKRASGFINRQLVETSQVIKLVAIILQAEFPDTEIIEVKALQNTTLRESFHLYKNRSVNDYHHAIDAYLTTIVGNYLYQVYPKLRPYFVYGQFKKFNQEKNIDILKRLKNFNFLRQLIFNTDDNIYISGTKEIVFNKKDIIHKLETAYGYKYMNISRECYQETSSLFNQTLYAHNSSVKNSLIPKKKGLPTEIYGGYSGNKDSFFVLVKIVKKRTNLYRIVGIPTRELAKLNSSNNYNQALNKIVESKLCLKETESFKILIKRLLYGTLIVDNGQKFRIGSFKEKHNVQQLVLQLKSMKYIKFYIDGGQNYFTDVERKKLEKQDRDKCLLYVFDDIMNVVNKRFTLFDMSKYEKDGDSLREKFNCLDFNDKVSILSDLLKAFHANSDRTSITKLKITNLGRHQAGKNGITLTTNAQIIYQSPTGLFERRIKIKDL

SEQ ID NO: 99 - protein, 1114 aa, Eubacterium rectale
MNYTEKEKLFMKYILALDIGIASVGWAILDKESETVIEAGSNIFPEASAADNQLRRDMRGAKRNNRRLKTRINDFIKLWENNNLSIPQFKSTEIVGLKVRAITEEITLDELYLILYSYLKHRGISYLEDALDDTVSGSSAYANGLKLNAKELETHYPCEIQQERLNTIGKYRGQSQIINENGEVLDLSNVFTIGAYRKEIQRVFEIQKKYHPELTDEFCDGYMLIFNRKRKYYEGPGNEKSRTDYGRFTTKLDANGNYITEDNIFEKLIGKCSVYPDELRAAAASYTAQEYNVLNDLNNLTINGRKLEENEKHEIVERIKSSNTINMRKIISDCMGENIDDFAGARIDKSGKEIFHKFEVYNKMRKALLEIGIDISNYSREELDEIGYIMTINTDKEAMMEAFQKSWIDLSDDVKQCLINMRKTNGALFNKWQSFSLKIMNELIPEMYAQPKEQMTLLTEMGVTKGTQEEFAGLKYIPVDVVSEDIFNPVVRRSVRISFKILNAVLKKYKALDTIVIEMPRDRNSEEQKKRINDSQKLNEKEMEYIEKKLAVTYGIKLSPSDFSSQKQLSLKLKLWNEQDGICLYSGKTIDPNDIINNPQLFEIDHIIPRSISFDDARSNKVLVYRSENQKKGNQTPYYYLTHSHSEWSFEQYKATVMNLSKKKEYAISRKKIQNLLYSEDITKMDVLKGFINRNINDTSYASRLVLNTIQNFFMANEADTKVKVIKGSYTHQMRCNLKLDKNRDESYSHHAVDAMLIGYSELGYEAYHKLQGEFIDFETGEILRKDMWDENMSDEVYADYLYGKKWANIRNEVVKAEKNVKYWHYVMRKSNRGLCNQTIRGTREYDGKQYKINKLDIRTKEGIKVFAKLAFSKKDSDRERLLVYLNDRRTFDDLCKIYEDYSDAANPFVQYEKETGDIIRKYSKKHNGPRIDKLKYKDGEVGACIDISHKYGFEKGSKKVILESLVPYRMDVYYKEENHSYYLVGVKQSDIKFEKGRNVIDEEAYARILVNEKMIQPGQSRADLENLGFKFKLSFYKNDIIEYEKDGKIYTERLVSRTMPKQRNYIETKPIDKAKFEKQNLVGLGKTKFIKKYRYDILGNKYSCSEEKFTSFC

SEQ ID NO: 100 - protein, 1362 aa, Lactobacillus paracasei
MTKLGKPYGIGVDIGSNSIGFAAVDENSHLIRLKGKTVIGARLFEEGKAAAKRRAGRTTRRRLSRNRWRLSFLRDFFESHITPTDPNFFMRQKYSEISPKDKARYKYEKRLFNDRTDAEFYQQYSTMYHLRNRLMTDPSRADVREIYFAIHHILKSRGHFLTPGDAKDFNTNDVALDEIFPALQDAYAQVYPDLGITFDEDKANEFKTILLNEIATSIDTQRALVKLLLAEEDDKDILKQQKQVLTEFAKAVVGLKTKLNLALGTEVDSSEATAWNFSLGQLDDKWAGIESAMTDEGTEILDQIRDLYRARLLNGIVPTGKTLSQAKVDDYTQHHEDLQLFKAYLKQLEDDGTAKAIRQLYDRYIDGDDAAPFLRENFVKALTKDVTAHPNTKSPELLERLAQPDFMLKQRNKANGAIPVQMQQRELDQIIKNQAVYYDWLAAPNPVEKHRKSMPYQLDELLNFRIPYYVGPLVTAKEQKAAQGGVFAWMVRKDPEGNITPYNFDEKVDREASANTFIQRMKTTDTYLIGEDVLPKQSLLYQRYEVLNELNNVRVNNEKLSIEQKQQVIRELFERHNSVTIKQFAENLRAHGDYAHIPEIRGLADEKRFLSSLSTYRQLKSLLPEAIDDPAKQADIENIIAWSTVFEDAAIFKTKLKEISWLGSEAITKLSNIRYRGWGQFSRKFLNGLTLGNGHTIIQELLLSTNNLMQILTDETLQKKMTELNADKLKTANINDAIDNAYTSPSNKKALRQVLRVVDDIKRAADGQDPSWLYVETADGGGTPGKRTRARQHQLQEIYANAAHELIDTAVRGELEDKISDKADFNDRLVLYFMQGGRDIYTGAPLNIDQLSSYDIDHILPQSLIKDNSLDNRVLVHAIINREKNATFASTIYAQKMNATWRQWHEAGLISGRKLRNLQMRPDQIDKYASGFVARQLVETRQIIKLTEQIVAAQYPDTKIIAVKAGLSHQLREELEFPKNRDVNHYHHAFDAFLAARIGTYLLKRFPNLQAFFTYGKFTKADVKKLRGFNFIRDITHAEDKIVAKDTGEVVWDKQRDVDELDRIYNFKRMLITHEVRFETADLFKQTVYGARDSKEAGGSKQLIPKKKGYPVDIYGGYFRENTAYLAVVKVTKKTETIFKVVKIATSQVAALNKARSRSTAEELSVLTELLKPKFSKVGKNGKITDTPFEVVLPRVPREQLFYNAKYGFFMVNSDTMFHNFQEIWVSRSDQKILQQIRKAKIDYPNVDQDLDNLFHNLADQIVKYFDLYSIAGFKEKISQSQNTFNDLAVDDTDQSVGKITVINELLKGAQANGMTGSLKVLKISTPFGFTQDKSGVLTKDSSIIYQSPTGLFERSVRLTDL

SEQ ID NO: 101 - protein, 1056 aa, Actinobacillus minor
MKALNYILGLDLGIASVGWAVVEIDQNELPIRLIDLGVRTFERAEVPKTGDSLALARRLARSSRRLVRRRAVRLLKAKRLLKQEGILQADDFHSSHLKPLPNNPWELRVKGLNHLLDRKEWAAVLLHLLKHRGYLSQRKNESKTDNKELGALLKGVSENRQLLQAQAFSTPAEIAIKKFQQEEGHIRNQRGAYSHTFDRNDLLAELRLLFQKQREFNNPYTSQSLEQAIAELLMWQKPALSGEAILKMLGKCTFEPSEYKAPKNSYSAEYFVWLTKLNNLRILENGADRGLTAEERQLLINQPFEKAKFTYAQARKLLELSDLAIFKGVRYGKDNAESATLMEMKAWHAIRKALESNGLKTEWNGLKTKPELLDKIGTAFSIYKTDEDISQYLNGELSPAVLNALLENLSFDKFIRLSLQSLAKILPLMEQGLRYDEACKQVYGDHYGKKEQLELRFLPKIPVEDIRNPVVLRTLSQARKVINGVVRLYGSPARIHIETGREVGKSFSERRDISKRQEENRNERQRAVEKFKEFFPHFVGEPKAKDILKMRLYEQQHGKCLYSGKELDLNRLLEKGYVEIDHALPFSRTWDDSFNNKVLVLASENQNKGNQTPYEWLNGKENAERWKLFQALVNGSRFPYSKKQRILTKYLDEDGFRERNLNDTRYVARFLCNFIEDNMQLVGQGKKRVFASNGQITALLRRSWGIQKVREDNDRHHAVDAVVVACSTRALQKKITDYVRYKEMNVFTGEKIDQETGEIIKFHFPEPWKFFRQEVEIRVFSETPAEDVVIALPDRPQANHEFIQPLFVSRAPTRKMTGQGHMETIKSAKRLAEGLSVSRVPLTQLKLKDLENMVNREREKALYEALKVRLEKFNNDPAKAFADPFYKKGGQQVKAVRVEQVQKSGVLVRQENGVADNASMVRVDVFIKGGKYFLVPIYTWQVAKGILPNRAATQGKEEEYWDIMDETAIFQFSLYQNDLIKLVTKKKTIFGYFNGLNRATSNINIKEHDLDKSKGKDGIYLEVGVKLALSLEKYQVDELGKNIQPCRSMKKRPPVR

SEQ ID NO: 102 - protein, 1081 aa, Neisseria flavescens
MTAFKPNPINYILGLDIGIASVGWAMVEIDEEENPIRLIDLGVRVFERAEVPKTGDSLAAARRLARSVRRLTRRRAHRLLRARRLLKREGVLQAADFDENGLIKSLPNTPWQLRAAALDRKLTPLEWSAVLLHLIKHRGYLSQRKNEGETADKELGALLKGVADNAHALQTGDFRTPAELAVNKFEKESGHIRNQRGDYSHTFSRKDLQAELVLLFEKQKEFGNPHISDGLKEGIETLLMAQRPALSGDAVQKMLGYCTFEPTEPKAAKNTYTAERFIWLTKLNNLRILEQGSERPLTDTERATLIDMPYKNKLTYAKARELLGLDDTAFFKGLRYGKDNAESATLMEMKAYHAIRRALEKEGLKDKKSPLSLSPELQDEIGTAFSLFKTDEDITGRLKGCLQPEILDALLKHINFDKFVQISLKALRRIVPLMEQGKRYDEACAETYGDHYGEKNSEEMLYLPPIPADEIRNPVVLRALSQARKVINGVVRRYGSPARIHIETAREVGKSFKDRKEIEKRQEENRKDREKAAAKFREYFPNFVGEPKSKDILKLRLYEQQHGKCLYSGKAIDIRRLNGKGYVEIDHALPFSRTWDDSFNNKVLVLGSENQNKGNRTPYEYLNGKDNSREWLEFKARVETSRFPHSKKQRVLLQKFDEKGFKERNLNDTRYVNRFLCQFVADHMQLTGKGKRRVFASNGQITNLLRGFWGLHKVRAENDRHHALDAVVVACSTVAMQQKITCFVRYKEMNAFDGKTVDKETGEVLHQKTHFPQPWEFFAQEVMIRVFGKPDGKPEFEEADTPEKLRALLAEKLSSRPEAVHEYVTPLFVSRAPNRKMSGAHKDTLRSAKRFVKHNEKISVKRVWLTEIKLADLENMVNYKNGREIELYEALKARLGAYGGNAKQAFDPKDNPFYKKGGQLVKAVRVEKTQESGVLLNKKNAYTIADNGDMVRVDVFCKVDKKGKNQYFIVPIYAWQVAENILPDIDCKGYRIDDSYTFCFSLHKYDLIAFQKDEKSKVEFAYYINCDSSNGRFYLAWHDKGSKEQQFRISTQNLVLMQKYQIDELGKEIRPCRLKKRPPVR

SEQ ID NO: 103 - protein, 1392 aa, Gemella haemolysans
MANKTWYLGLDIGSASVGWAATDTGYKIIRKNKKRLWGVRLFEEAKTAEDRRGYRSSRRRLARRKWRLNLLEELFTSEVKKVDENFFLRLKESQYHYEDKTHKVPYAIFNDKDYTDKDYYKDYPTIYHLRSKLMTEENPDIRKVFLAIHHIIKNRGHFLLQGQSFKDGNLNNLIKELLELDILHVGFEVTEEVVDKIADISLEKKTSKDKLNDIKELYPKEKQLLEVFRLIFGGKTSLDKLFAIDEYKELDAAIKSVSFKEKIYEEVRHDYEQVLSNYIELLDLAKLVYDSIILSDIKKEGKTLSESKVELFEKHRDDLLKLKNLVKNDSKLSEDKKVELYALIFKEDKDKGTNYVNYIRKSEEGKGCNYEDFKKFLVKELAKLEESSVKTEIIKDLELEQFLPLQRTKDNSVVPYQIHKEELVKILDNAARYHSFLNEKDESGYNVREKVIQLLEFRIPYYVGPLNSSKKAKEGGFAWSVRNTGYENTPVTPWNYSKVIDESASAEKFITNLTNKCTYLKGEDVLPKSSLLYSEFALLNELNALKYDGNRISLEARNTIIEKLFKQQGKKVTKTSIKNLLKAEGYIDGKGEITGIDITVKNDLKSYRDFKKILGNKFNSEHVENIILWITLYGESRKLIKAKIESVYGEVYSKDEITKMSRLVYKDWGRFSRKLLTELVSKKLYNEETGECLNIIGAMRQNNILFMELLADRFDYSKQIVEFNKELQEDVTEIAPEILDDLYVSPAVKRSIWQTVRIVEELKKIIGCAPAKIFVETTRSNQEKKKPTDSRKKQLELAYKAVKKDVKELEKEIGTINFDVLNDRLSSVEPSKLKAKKLYLYYTQLGRCMYSEEPINISELFDNNKYDIDHIYPQSKIKDDSFTNTVLVKRESNAAKTDRYPLGSDIQTPSNRRFWKFLKEKGLISDEKYNRLVRTEEFSDEELSGFIARQLVETSQSVKAVASILGELNPETSICYSKAENVSSFRQNFGKIKKGDRDSKNNDQLIKVREINDYHHAKDAYLNVVVGNVYDTKFTRNVFNFIKDKKDGRKYSLNKVFYENVSDSKTVAWEMDKTIHQVEKVMNNNNIMVTRRTSEQKGGLFDATVYKAKVAAKAKDGVYYPLKTSNSVVKDVAKYGGYTSIGIAYYSIFEYTIVNKKGEEKITRIIPIPIYISQNIKDSTALIEFGKSQIFCRAYEKIKDFKLLYRKLCIGSKININNYQYYIGGKSDERFYYDSAIQVTLDKKSEKYLKILSKYQNWKKENKDGELWENITKENNIELYNKLVEKMNSEIFTKKKSNKYNELNSEEIRNNFIKISVEEQAKVLLEILNLLTNKKSIFDLKSIDIKAARGKISFNLTSLIQFSIIEQSITGFYEKEITIIGDKGNDMENNNS

SEQ ID NO: 104 - protein, 702 aa, Helicobacter pullorum
MRKILKIDERIQFKEVDYTAKNPENKKFVEFKNLKKFCEILGAIVGDRALADSIARDMTLIKDEEELAQKLRGYGKFSQEQITQLSALHFSHHISLSLKALSEILPFMREGMRYDEACQEAKLQAKHNDKKSKFLPPFCESIYADELTNPVVHRAIAEYRKILNALIAKYGSVHKIHIELTRDVGKNFQEREKYKKEIESNYKARVQAMQECEKLGLTLSEGNILKLRLFREQNEICVYSGRKITLANLKEQGALEIDHILPYSRSSDDSYMNKVLVFTNENQNKGNKTPYEAFGGDSQKWGEIESLALRSGYPKKKAKRILDKGFGDREAGFKSRNIVDSGYIARLIANYTKEYLKFLPLDSHENTALIAGEKDSKIHVEAVKGMLTATMRHFWGLGSKNRYEHTHHAVDAIIIAYINAAMIQRFSQFRQNQESLKARFYAKELAKEEFKTQRAFFEPFSGFREQVLAKVGQIFVSRPPRKRARGALHEETFYSIDDKKLSETYGGKKGVQRALSLGKIRQIGTKIVANGPMVRVDIFKHTQSGRFYAVPIYTMDFALGILPNKAVVSGKDKDRIIKDWLEMDSCYEFCFSLFKDDVIEVQKRDMEKPELAYFVSLDASDGRIKVRHHCNDITKINENQKKLFSEAIEKEVVGRGSIQNLKVFKKYKVSPLGEIKEAKYEPRQPIALKTSPKKHRKQNNAQ

SEQ ID NO: 105 - protein, 1371 aa, Streptococcus dysgalactiae
MDKKYSIGLDIGTNSVGWAVITDDYKVPSKKFKVLGNTDRHSIKKNLIGALLFDSGETAEATRLKRTARRRYTRRKNRIRYLQEIFSSEMSKVDDSFFHRLEESFLVEEDKKHERHPIFGNIVDEVAYHEKYPTIYHLRKKLADSTDKADLRLIYLALAHMIKFRGHFLIEGDLNPDNSDMDKLFIQLVQTYNQLFEENPINASRVDAKAILSARLSKSRRLENLIAQLPGEKRNGLFGNLIALSLGLTPNFKSNFDLAEDAKLQLSKDTYDDDLDNLLAQIGDQYADLFLAAKNLSDAILLSDILRVNSEITKAPLSASMIKRYDEHHQDLTLLKALVRQQLPEKYKEIFFDQSKNGYAGYIDGGASQEEFYKFIKPILEKMDGTEELLAKLNREDLLRKQRTFDNGSIPHQIHLGELHAILRRQEDFYPFLKDNREKIEKILTFRIPYYVGPLARGNSRFAWMTRKSEETITPWNFEEVVDKGASAQSFIERMTNFDKNLPNEKVLPKHSLLYEYFTVYNELTKVKYVTEGMRKPEFLSGKQKEAIVDLLFKTNRKVTVKQLKEDYFKKIECFDSVEISGVEDRFNASLGTYHDLLKIIKDKDFLDNEENEDILEDIVLTLTLFEDKEMIEERLKKYANLFDDKVMKQLKRRHYTGWGRLSRKLINGIRDKQSGKTILDFLKSDGFANRNFMQLINDDSLTFKEAIQKAQVSGQGHSLHEQIANLAGSPAIKKGILQSVKVVDELVKVMGHKPENIVIEMARENQTTQKGQKNSRERMKRIEEGIKELGSQILKEHPVENTQLQNEKLYLYYLQNGRDMYVDQELDINRLSDYDVDHIVPQSFIKDDSIDNKILTRSDKNRGKSDNVPSEEVVKKMKNYWRQLLNAKLITQRKFDNLTKAERGGLSELDKAGFIKRQLVETRQITKHVAQILDSRMNTKYDENDKLIREVKVITLKSKLVSDFRKDFQFYKVREINNYHHAHDAYLNAVVGTALIKKYTKLESEFVYGDYKVYDVRKMIAKSEQEIGKATAKRFFYSNIMNFFKTEITLANGEIRKRPLIETNEETGEIVWDKGRDFATVRKVLSMPQVNIVKKTEVQTGALTNESIYARGSFDKLISRKHRFESSKYGGFGSPTVTYSVLVVAKSKVQDGKVKKIKTGKELIGMTLLDKLVFEKNPLKFIEDKGYGNVQIDKCIKLPKYSLFEFENGTRRMLASVMANNNSRGDLQKANEMFLPAKLVTLLYHAHKIESSKELEHEAYILDHYNDLYQLLSYIERFASLYVDVEKNISKVKELFSNIESYSISEICSSVINLLTLTASGAPADFKFLGTTIPRKRYGSPQSILSSTLIHQSITGLYETRIDLSQLGGD

SEQ ID NO: 106 - protein, 1007 aa, Helicobacter canadensis
MKVLGFDIGINSIGWAFVENNELKDCGVRLFTKAENPKTKESLALPRRNARSSRVRLRRRRSRLLSLKHIISKEFGLHYEDYIALDGNLPKAYTGKIESIYKLRYEALSQAISKEDLARVILHIAKHRGYMNKNQKTSQDSEKGAILSAIKENSNKIKHYQTAGEYFYKELFENLRDGTKEFKNIRNKAMKNEKTGNMESTYYNTILASDLEKELKLILEKQQAYHNYSDTFIKEVLEIAFYQRPLKDFSHLVGSCTFYENEKRACKNSYSAWEFIALGKIINTLESIKKDTGEIFSNEIITQILKEVLDKGSLSYTKLRKMINLDEKVKFKGLKYDKEGVEKTNLIEFKKLKEFKKALGEHNLERKTLDEIATHITLTKDENQLKKQLEQYALSQNQIDALAELDFNDHINLSFKALYEILPLMEKGKRYDEACNELGLKAKTSNQKSEFLPAFCDSIFAQELTNPIVNRAISEYRKVLNRLLKKYGKMHKIHIELARDAGLSKEARNKIEKEQKENKDINDKAEKTCKEFGLKPNAKNILKIKLWREQGEICAYSGKKITIDDLKEDKALEVDHIYPYSRSYDDSYNNKVLVFIKENQLKLNQTPYEAFGSNQEKWSKIQVLAQKLPYKKKNRILDENFKNKDQIEFISRNLNDTRYATSLIAKYTKEYLEFLPLSDDEDISLKSGEKGSKTHVQTMNGMLTSVLRHAWGFSQKDRNNHLHHALDAIIIAYSTNSIIKAFSDFKKNQEILKAKLYAKKLTSEEYKNQSKFTGFEKYRSKILEKLDSIFVSKPPNKNTKGALHEQTFYSYQDILEEYKTQEGLKRALECGKVRKIGTKYVVNDRMVRLDIFKKDNKFYGIPIYTMDFALGVLPNKVVTIGTDKDKIKKEWKTIDETYEFCFSLYKGDLVLIQKKEMQESEFAYYNGFDISSASISLEKHDNKFENLTENQKLLFPKAKEGDVEVRGIGIQGLKVFKKYMVTPLGEIQETRTEARQNIQPRKKHGLR

SEQ ID NO: 107 - protein, 1397 aa, unidentified
  REGION 1..1397: note = Description of Unknown: gamma Proteobacterium sequence
MTKNYISPIAIDLGAKFTGVALYQYLEGADCTQEVAKGLLVDDRGNVTWSQEGRRGKRHQVRGYKRRKMAKRLLWLILDSEYGIKREEVTEPLLKFINGLLNRRGYTYISEEVDEESMNVSPLPFSEMMPDYFNSSAPLLEQLAKLLSDKNKLVRFRAEGKIPSNKNEFKKLLDTALDGKYKDEKKELSEAWGNILIASENVLKSTVDGHKSRSEYLANIKEDIKSNEELEKQISSKEIDGFYNLVGHLSNFQLRLLRKYFNDPNMSGVSYWDEKRLEKYFYQWVQGWHTKGGTDEAEKKNIILKTKGAPLLKTLKSLSADLTIPPYEDQNNRRPPKCQSVLLSDEKLTMHYPKWKEWVGQLVKQNDNAYLNENVTLANALHRIVERSRSIDPYQLRLLISITDAEKRNDLAGYKRLKLSLGSEVDEFLLLVKNIVDETKEAREGLWFETENKLFFKCGKTPPRKEKLKSTLLSAVLGKNLSDDEQSSFIEEFWKSGTPKIERRNVRGWCRLASQVQKTYGVYLKEYGLQQLHKLEAGKKLDDKPLALLYKNSGLIASKIGEALNIEPDEVSRFASPHSLAQIFNIIEGDVAGFNKTCRACTYENIWRMQEEKVESLLTNQLLSEIHGERKVPLKSAMCTRLSADSTRPFDGQMASIIEHIARKIAQHKIAQINDVPKEFSIDIPIIIESNQFSFTAELEEIKRGRGSAKAKKAKELGEKSKAGWVSKTERIKTSSEGICPYTGAPLGGSGEIDHIIPRSLTGRTKKTVFNSEANLIYCSSKGNHDKGNRVYVIEQLNDKYLKKQFSTSDVNLIKKKIKTTIQRFTEGGEKLRSFSELSREDQKAFRHALFVPELKSEVTSLLAVKNITRVNGTQAWLAKKIASLLAEHLDKQGRDYTLSAHQIDPWSVSKQRKMLASAEPIWAKKDPQPAASHVVDAVCTFLEALEQPHTASRLKTISSTSFEKTGWRSALIPDLIKVDALDRRPKYRRYNIGSTSLFKDGIYAERFLPILIDENGLMAGYDIDNSLKAKGADVVFESLSPFLLFKGEEVGAQSLSDWQERIDGRYLYMSIDKVKAFDYLQEKVGEKDIAAELLNSIHFTQRKTELRAKFSDDSGKKMKTLDAIRKSLKLTVTVNEIGKRKEKCGFSGTIGIPAKSAWENLLDEPLLETYWGTKMPPQEIWEKVYRKHFPRNIPNQAHRKVRKDFSLPVVDSVSGGFRVKRKTPNGYNYQLLAIDGYSAVGFKKEGDNVDFKSPALVPQIAESKSVTPISSELVHLDKNEIVYFDEWRKIDISDSDLKQFVSSLELAPGSQNRFYIRFTVDEDQFERHFKSALRVNGIQDLDTVNKTFDWNREIPSLLIPPRSNLFLLETGQKITFEYIANGANAEVKKAYSLRRA

SEQ ID NO: 108 - protein, 1082 aa, Neisseria meningitidis
MAAFKPNPINYILGLDIGIASVGWAMVEIDEEENPIRLIDLGVRVFERAEVPKTGDSLAMVRRLARSVRRLTRRRAHRLLRARRLLKREGVLQAADFDENGLIKSLPNTPWQLRAAALDRKLTPLEWSAVLLHLIKHRGYLSQRKNEGETADKELGALLKGVADNAHALQTGDFRTPAELALNKFEKESGHIRNQRGDYSHTFSRKDLQAELILLFEKQKEFGNPHISGGLKEGIETLLMTQRPALSGDAVQKMLGHCTFEPAEPKAAKNTYTAERFIWLTKLNNLRILEQGSERPLTDTERATLMDEPYRKSKLTYAQARKLLGLEDTAFFKGLRYGKDNAEASTLMEMKAYHAISRALEKEGLKDKKSPLNLSPELQDEIGTAFSLFKTDEDITGRLKDRIQPEILEALLKHISFDKFVQISLKALRRIVPLMEQGKRYDEACAEIYGDHYGKKNTEEKIYLPPIPADEIRNPVVLRALSQARKVINGVVRRYGSPARIHIETAREVGKSFKDRKEIEKRQEENRKDREKAAAKFREYFPNFVGEPKSKDILKLRLYEQQHGKCLYSGKEINLGRLNEKGYVEIDHALPFSRTWDDSFNNKVLVLGSENQNKGNQTPYEYFNGKDNSREWQEFKARVETSRFPRSKKQRILLQKFDEDGFKERNLNDTRYVNRFLCQFVADRMRLTGKGKKRVFASNGQITNLLRGFWGLRKVRAENDRHHALDAVVVACSTVAMQQKITRFVRYKEMNAFDGKTIDKETGEVLHQKTHFPQPWEFFAQEVMIRVFGKPDGKPEFEEADTPEKLRTLLAEKLSSRPEAVHEYVTPLFVSRAPNRKMSGQGHMETVKSAKRLDEGVSVLRVPLTQLKLKDLEKMVNREREPKLYEALKARLEAHKDDPAKAFAEPFYKYDKAGNRTQQVKAVRVEQVQKTGVWVRNHNGIADNATMVRVDVFEKGDKYYLVPIYSWQVAKGILPDRAVVQGKDEEDWQLIDDSFNFKFSLHPNDLVEVITKKARMFGYFASCHRGTGNINIRIHDLDHKIGKNGILEGIGVKTALSFQKYQIDELGKEIRPCRLKKRPPVR

SEQ ID NO: 109 - protein, 1334 aa, Listeria monocytogenes
MKKPYTIGLDIGTNSVGWAVLTDQYDLVKRKMKISGDSEKKQIKKNFWGVRLFEKGETAAKRRMSRTARRRIERRRNRISYLQEIFAIQMNEVDDNFFNRLKESFYAESDKKYNRHPFFGTVEEEVAYYKDFPTIYHLRKELIDSQKKADLRLVYLALAHIIKYRGHFLIEGALDTKNTSIDEMFKQFLQIYNQVFANDIEEASLKKTEKNQEVAQILAEKFTRKDKLDKILSLYPGEKTTGVFAQFVNIIVGSTGKFKKHFNLHEKKDINCAEDTYDTDLESLLAIIGDEFAEVFVAAKNAYNAVVLSNIITVTDSTTRAKLSASLIERFENHKEDLKKMKRFVRTYLPEKYDEIFDDTEKHGYAGYISGKTKQADFYKYMKATLEKIEGADYFIAKIEEENFLRKQRTFDNGVIPHQLHLEELEAILHQQAKYYPFLREDYEKIKSLVTFRIPYFVGPLAKGQSEFAWLTRKADGEIRPWNIEEKVDFGKSAVDFIEKMTNKDTYLPKENVLPKHSLCYQKYMVYNELTKVRYIDDQGKTNYFSGQEKQQIFNDLFKQKRKVKKKDLELFLRNINQIESPTIEGLEDSFNASYATYHDLLKVGMKQEILDNPLNTEMLEDIVKILTVFEDKRMIKEQLQQFSDVLDGTVLKKLERRHYTGWGRLSAKLLVGIRDKQSHLTILDYLMNDDGLNRNLMQLINDSNLSFKSIIEKEQVSTTDKDLQSIVAELAGSPAIKKGILQSLKIVDELVSVMGYPPQTIVVEMARENQTTNKGKNNSKPRYKSLEKAIKEFGSQILKEHPTDNQELKNNRLYLYYLQNGKDMYTGQELDIHNLSNYDIDHIVPQSFITDNSVDNLVLTSSAGNREKGDNVPPLEIVQKRKIFWEKLYQGNLMSKRKFDYLTKAERGGLTEADKARFIHRQLVETRQITKNVANILHQRFNYKTDGNKDTMETVRIVTLKSALVSQFRKQFQFYKVREVNDYHHAHDAYLNGVVANTLLKVYPQLEPEFVYGEYHQFGWFKANKATAKKQFYTNIMLFFAQKDRIIDENGEILWDKRYLETVKKVLGYRQMNIVKKTEIQKGEFSNVTPNPKGKSNKLIPRKKDWDPIKYGGFDGSKMAYAIIIEYEKQKRKVRIEKKLIQINIMEREAFEKDEKTFLEEKGYHQPKVLIKVPKYTLYECKNGRRRMLGSANEAHKGNQMLLPNHLMALLYHAEKYEAIDGESLAYIEVHRALFDELLAYISEFARKYTLSNDRLDEINMLYERNKDGDVKSIAESFVSLKKFNAFGVHQDFSFFGTKIERKRDRKLNELLNSTIIYQSITGLYESRKRLDN

SEQ ID NO: 110 - protein, 1337 aa, Enterococcus faecalis
MKKDYVIGLDIGTNSVGWAVMTEDYQLVKKKMPIYGNTEKKKIKKNFWGVRLFEEGHTAEDRRLKRTARRRISRRRNRLRYLQAFFEEAMTALDENFFARLQESFLVPEDKKWHRHPIFAKLEDEVAYHETYPTIYHLRKKLADSSEQADLRLIYLALAHIVKYRGHFLIEGKLSTENISVKEQFQQFMIIYNQTFVNGESRLVSAPLPESVLIEEELTEKASRTKKSEKVLQQFPQEKANGLFGQFLKLMVGNKADFKKVFGLEEEAKITYASESYEEDLEGILAKVGDEYSDVFLAAKNVYDAVELSTILADSDKKSHAKLSSSMIVRFTEHQEDLKKFKRFIRENCPDEYDNLFKNEQKDGYAGYIAHAGKVSQLKFYQYVKKIIQDIAGAEYFLEKIAQENFLRKQRTFDNGVIPHQIHLAELQAIIHRQAAYYPFLKENQEKIEQLVTFRIPYYIGPLSKGDASTFAWLKRQSEEPIRPWNLQETVDLDQSATAFIERMTNFDTYLSSEKVLPKHSLLYEKFMVFNELTKISYTDDRGIKANFSGKEKEKIFDYLFKTRRKVKKKDIIQFYRNEYNTEIVTLSGLEEDQFNASFSTYQDLLKCGLTRAELDHPDNAEKLEDIIKILTIFEDRQRIRTQLSTFKGQFSAEVLKKLERKHYTGWGRLSKKLINGIYDKESGKTILGYLIKDDGVSKHYNRNFMQLINDSQLSFKNAIQKAQSSEHEETLSETVNELAGSPAIKKGIYQSLKIVDELVAIMGYAPKRIVVEMARENQTTSTGKRRSIQRLKIVEKAMAEIGSNLLKEQPTTNEQLRDTRLFLYYMQNGKDMYTGDELSLHRLSHYDIDHIIPQSFMKDDSLDNLVLVGSTENRGKSDDVPSKEVVKDMKAYWEKLYAAGLISQRKFQRLTKGEQGGLTLEDKAHFIQRQLVETRQITKNVAGILDQRYNANSKEKKVQIITLKASLTSQFRSIFGLYKVREVNDYHHGQDAYLNCVVATTLLKVYPNLAPEFVYGEYPKFQAFKENKATAKAIIYTNLLRFFTEDEPRFTKDGEILWSNSYLKTIKKELNYHQMNIVKKVEVQKGGFSKESIKPKGPSNKLIPVKNGLDPQKYGGFDSPVVAYTVLFTHEKGKKPLIKQEILGITIMEKTRFEQNPILFLEEKGFLRPRVLMKLPKYTLYEFPEGRRRLLASAKEAQKGNQMVLPEHLLTLLYHAKQCLLPNQSESLAYVEQHQPEFQEILERVVDFAEVHTLAKSKVQQIVKLFEANQTADVKEIAASFIQLMQFNAMGAPSTFKFFQKDIERARYTSIKEIFDATIIYQSTTGLYETRRKVVD

SEQ ID NO: 111 - protein, 1426 aa, Capnocytophaga ochracea
MKNILGLDLGTTSIGFAHIVEDENKEKSEIKELGVRIVSLTTDEQSDFEKGKSITTNANRTLKHGARLNLDRYQQRRKYLIDLLQKANLITPSSILAENGKNTTHSTWQLRAKAVTERIEKEEFARILLAINKKRGYKSSRKAKTEDEGQAIDGMAIAKRLYDENLTPGQLSLQLLQQNKKLLPDFYRSDLQKEFDLVWNFQKQFYPDILTDIFYKELQGKGKDATSKAFSKRYHFDTTENKGSKESVRLQAYQWRAEAISKQLSKEEVAYVLTEINNNLNNASGYLGAISDRSKELYFNRQTVGQYLYAKLQENRHNSLKNKVFYRQDYLDEFERIWETQASFHKELTDELKKQIRDVVIFYQRKPKSQKGLISFCEFESKEIEIEKDGKTITKNIGARVVPKSSPLFQEFKIWQILNNVICKRKGIRKKKISAKTTQLDLLNESSQTIFSLDMECKQLLFDELNLKGDLKSDKVLKLLGYSPQEWEINYNQLEGNRTQKALYEAYLKIVEMEAHDVKDILQIKSAKDDWSLDESPLSASEIREKVKAIFQTLGICTKILYFDPLLPVKEFEEQDSYQLWHLLYSYESDDSTSGNETLYRILEKKYAFKREHARILANVALQDDYGSLSTKAIRKIYPNIKENQYSTACEKAGYKHSKLSLTTEELEARELKNIIPLLKKNALRNPVVEKILNQMINVVNALIEKNSERDAEGKITKYFHFDEIRIELARELKKNAQKRYEMTQNINKAKLEHQKISEILQKEFGIKNPTKSDIIRYRLYQELEHNGYKELYTNAPIARDMLFSKNIEIEHIVPKARVFDDSFSNKTLTFHRINSDKGEYTAFDYITSLNSEEELNQYLTRVENAYKTKSISPTKYKNLLKKASEIGDDFINRDLRDTQYIAKKAKEILFQVTKNVLSTSGSITDRLREDWGLVDVMKELNMPKYQSLGLTEVEERKDGNKVTVIKNWTKRNDHRHHAMDALTVAFTKPSYIQYLNHLNARKDENNKNYSVILAIEEKETIKVPTNNGKNKRVFIEPIPNFRQVAKKHLEEIFISHKAKNKVVTKNTNKPAGTDKQQITLTPRGQLHKETIYGKYQYYINKEEKIGVKFDERTIAKVSNPVYREALLKRLQANDNDPKKAFAGKNALSKNPIYLDESKTKTLPEKVNLTYLEEDFSIRKDISPDNFKDLKSIEKVIDQGVKRILIKRLQAYDNDPKKAFVDLEKNPIWLNKEKGIAIKRVTISGVNNAQPLHIGKDHLGKTTLNKEGKEIPVDYVSTGNNHHVAIYRDKEGNLQEQIVSFFDAVVRAQQGIPIIDKTYKQAEGWQFLFTMKQNEMFVFPNATTGFNPAEIDLLDPKNKKLISPNLFRVQKIATKDYFFRHHLETNVETDNILKNVTWKREGLSGLKDIVKVRINHLGDIVSIGEY

SEQ ID NO: 112 - protein, 1424 aa, ParaBacteroides sp.
MKRILGLDLGTNSIGWALVNEAETDEEVSSIIRLGVRVNPLTVDETQNFEKGKSITTNAERTLKRSMRRNLQRYKLRRDALVEFLKELGFITDETILSEQGNRTTFETCRLRAKAAEEEISLEELSRVLLMINKKRGYKSSRKVKKEEDGVLIDGMEIAKKLYEEDLTPGQLCSQLLESGKKVLPDFYRSDLQEELDRIWSVQKQFHPDVFCDAAKEEIKGKNRSQTWAILANYFVWKEEVVGWNDREAKNETIEKECKLVGLKRTTKGYELKKENYRWRAQALTEQLGLEEIAVVLQEINGQINASSGYLGAISDRSKVLYFNHQTVGQYQMAELDKNPHASLRNMVFYRQDYLDEFDRIWEKQAEFHKELTAELKKEIRDMIIFYQRRLKSQKGLISFCEFERLEIVVEKDGKKQTKVIGCKVIPRSHPLFQEFKVWQTLNDIKVLGREKKRNALSASESRALYPEEKEILARELAIKENMKKADVLKLLFENPQELDLNFKQIDGNRTGFSLFSAYSKMIEKYGYEPLDFKKPADEIIGQLRTIFTDLGWNTNLFTIDLTKEGKELEMQPYFRLWHLLYSFEGDNTSTGNGKLIEKIMQLCGVEKEYAVELASLSFQDDYGSLSAKAIKRILPYLKEGNLYDVACEYAGYRHSKSSLTKEEIENKVLKGKLEVLPKNSLRNPVVEKILSQMVNVINTIIDTYGKPDEIRVELARELKKSAKEREELTKAIAKSTREHEEIRKLLQDEFGMMNVSRNDIIRYKLYEELKDNGYKTLYSNQYIPKEKIFSKEIDIEHIIPQSRLFDDSLSNKTLEYKAINIEKGNKTAYDFVKEKYGEEGLQQYINRCESLFNDKKAKLRKLKMEQKDIPDGFIDRDLRNTQYIAKKALAMLNEICRRVVATTGSITDQLREDWQLVDVMKELNLPKYEALGFVETYEDKDGRKIKRIKDWTKRNDHRHHAMDALTVAFTKDAFIQYFNNKNAAQDSGNRNHTNIIGIKTRYFDKGRALPPIPLEQFRIEAKQHLEKLLVSIKAKNKVVTVNVNRTKKRKGENTKIQQTPRGQLHLETVYGSHKQYVTKIEKVNASFDAAKIATVSKRAYRNALLKRLETFGNDPKKAFTGKNALEKNPLYADKYQTIRVPEKVQTVEFETIYTIRKPVDPALNVDKVVDVKVRAILERRLKEYGGDPKKAFVNFWENPIWLNKEKGISIKRVSIRGINNAQSIHVKKDKNGNPIWDENGKQIPVDFVNTGNNHHVAIYRKPVLDKKGQVTFDEDGNLMYELDEVVVPFFEAVTRANLGLPIIDKDYRKSEGWQFLFSMKQNEYFVFPNEKTGFNPKEVDLLNPDNYAMISPNLFRVQTMSKVMYGNNVVRDYKFRHHLETTVKDMKELKDIAYKQYKTLSFGNSVVKIRINHIGQIVSVGEY

SEQ ID NO: 113 - protein, 1395 aa, Lactobacillus jensenii
MKEIKDYIIGLDIGTNSCGYVVTDKQNNILKLKGKTAIGARLFKEGQAAADRRSFRTTRRRLARRHWRLGLLEEIFDPEMEKIDPNFFRRLKESDYSPKDSRKQFNAIVFKSIKADKRFYKKYPTIYHLRNALMHDNQKHDLREIFMAVHHIVKYRGNFLREDSVNAFKAAKFSLRGEDGIGPVDKLNDLLKEIYSEYSPELATNNLSKIEDIIKDKNLYKQDKLKQVATLLIKEADSKDKAKLNKDIAKQVANSFMGYMFRLDTLFSLTDVDVKDYKLKFSDANIDESLDDLTSLLTDAQIEFVLELQSIYNTIVLNEIVPDGMSLSESMIKKYDDHKEDLKIFKEYIDSLSDQKKAKKLLSAYNLYVNYRKSDLVEAKNLFKNKKVGDKNFADVISNFEVFGKFVSDNLDDSELANKIKARLDLGEFLPKQRTNQNGVIPYQLHQVELTQILEKQGKYYPFLITPNPVESHRNNAPYEISELVSFRVPYYVGPLIDNQSIKDKQNKNKFAWMVRQKQGQITPWNLEEMVDTTESANQFIKRMTRKDTYLLAEDVLPKSSLVYQKFMILDELNRIKIDGKKLTSELKHDIFEKLFKKQKSINLDNLKNYLLVEGNIPGLIEGLSDGINFNNSFSTYIDYRNIFGDEIDNPNKQADFEKMIEWSTVFEDRKIFKRKLKEITWLTSEQIKQVSSKRYSGWGRLSKKLLTQITDENGVNILQRLWNEPETLTEVLANPVIKRKIVEANSSFTKAKDMKDILVEAYTSPQNKKAIRQVMRVVDDIIAAAHGKKPSQIAIEFAREDQDNPQMTKSRKAQLDQIYAKISDEFLDDAVKNELKNMKDNKPLAKDKVFLYFKQMGRDAYSGEKLSLDNLQDYDIDHIYPQSFIKDDSFDNRVLVQRAYNNGKSDNVPVLLFGNKIAAGLGITIRQMWKKWLELGLISKRKFNNLITDPEKISRNMASGFVNRQLVETSQVIKLVANILQAKLPDTEIIEVKASYNSILRKEFNLYKSREVNDYHHAIDAYLTTIVGNYLYQVYPKLRPYFVYGQFKKFGKAENQEDDPVKKIKKFNFIYQLIWGKDDAICISHTNQQVFSKKDIIDKLTTAYNFKYMNISHAVYTRNNNMFKQTLFPIIERTTAKTKSLIPKKLDRPTDIYGGYSNNNDAYLALVKVDKKRGSEYRVVGIPMRAAAMLKASKNYDEDLRKVIEPMVMFDKNGKAKRGIEGFRVLVGKMPFKQAVLDGNKKFMLTGTVDTPNLKQLVLSQQNMKYILDYIEDVDCRKHKFGDKVQNPDKCLLEVFDEIIEIVDKYFELFDSRDFREKLRNSRNKFIKLEASKKADTILAILKGLQAKSTRATIKELNISDFGRIITSSISPEAQLIYQSPTGLFERRVKVKDL

SEQ ID NO: 114 - protein, 1140 aa, Roseburia intestinalis
MRENGSDERRRNMDEKMDYRIGLDIGIASVGWAVLQNNSDDEPVRIVDLGVRIFDTAEIPKTGESLAGPRRAARTTRRRLRRRKHRLDRIKWLFENQGLINIDDFLKRYNMAGLPDVYQLRYEALDRKLTDEELAQVLLHIAKHRGFRSTRKAETAAKENGAVLKATDENQKRMQEKGYRTVGEMIYLDEAFRTGCSWSEKGYILTPRNKAENYQHTMLRAMLVEEVKEIFSSQRRLGNEKATEELEEKYLEIMTSQRSFDLGPGMQPDGKPSPYAMEGFSDRVGKCTFLGDQGELRGAKGTYTAEYFVALQKINHTKLVNQDGETRNFTEEERRALTLLLFTQKEVKYAAVRKKLGLPEDILFYNLNYKKAATKEEQQKENQNTEKAKFIGMPYYHDYKKCLEERVKYLTENEVRDLFDEIGMILTCYKNDDSRTERLAKLGLVPIEMEGLLAYTPTKFQHLSMKAMRNIIPFLEKGMTYDKACEEAGYDFKADSKGTKQKLLTGENVNQTINEITNPVVKRSVSQTVKVINAIIRTYGSPQAINIELAREMSKTFEERRKIKGDMEKRQKNNEDVKKQIQELGKLSPTGQDILKYRLWQEQQGICMYSGKTIPLEELFKPGYDIDHILPYSITFDDSFRNKVLVTSQENRQKGNRTPYEYMGNDEQRWNEFETRVKTTIRDYKKQQKLLKKHFSEEERSEFKERNLTDTKYITTVIYNMIRQNLEMAPLNRPEKKKQVRAVNGAITAYLRKRWGLPQKNRETDTHHAMDAVVIACCTDGMIQKISRYTKVRERCYSKGTEFVDAETGEIFRPEDYSRAEWDEIFGVHIPKPWETFRAELDVRMGDDPKGFLDTHSDVALELDYPEYIYENLRPIFVSRMPNHKVTGAAHADTIRSPRHFKDEGIVLTKTALTDLKLDKDGEIDGYYNPQSDLLLYEALKKQLLLYGNDAKKAFAQDFHKPKADGTEGPVVRKVKIQKKQTMGVFVDSGNGIAENGGMVRIDVFRVNGKYYFVPVYTADVVKKVLPNRASTAHKPYGEWKVMEDKDFLFSLYSRDLIHIKSKKDIPIKMVNGGMEGIKETYAYYIGADISAANIQGIAHDSRYKFRGLGIQSLDVLEKCQIDVLGHVSVVRSEKRMGFS

SEQ ID NO: 115 - protein, 992 aa, Treponema vincentii
MQKNSGEDENCGFEFLTEEEKELIKPLFFRISKPSFQFADIEKKLKGKNGFWKFNYRKDTNVSGCPVSAGLKNIFGDEASAESWKDKKVGQYDMCDIWHVLFDFDDEEKLLEFAKRKLFLSDEAAKKFCAIRIQQGYANLSLKAIRKITPFLRKGYIYSTAVFLANIPFMIGRDIFLQNEKEIEDSVKNIIGTLRDKNNIIVLANRCIESAFKDKDNDFRFEEWDKALVENSAWDLFGKKKWNEYDEEKRKTIISQVSEKVEDNLKIAVGKNPNDYKYPLLRTDDLIMDYLNQKGFVVKGELYHPSDTDYNFETPVPAEDGKIYLASPRSPSVKNPVVMRALHQLRKLVNYLIKTGKIDSTTKINVELANDVNDKNQRKAIEELAKTNEKNNADARKKIEELCNEAGFKVVPTESDIKKFRLWKEQNETCPYTGKHISFTDLFGPIPKFDFEHTIPRSLSYDDSLENLTLCDSEFNRNIKKQRLPSELPDFEEINKRFLKFYEDKIDNCLRIIELNSKSGGSYEEPAVKDLRIVKKHKAQYELNYYKEKLRRFSSTEITSGFKHSQLNDTRIITKFSLSYLKGVFDHVQPVKGSMTDTFKRQWGLMERNEIKDRSNHTHHTVDALTVACINRGKFNLLSEAIKNSSDGKHLKFPKPWETFDTDVLNAVRYIIPKYFSDESSLRQSKKILRGRDGKPVLKNGKAVFIQGATARGSLHKDTFYGCIKTVPEKGGKSEMIFVQRIPVSTLDEKVAEKIIDKRIRKTFEKNLSTGIQTLQEIQTDGILLPFKKEGRDVFVKRVRIKAHPTSPIILKKHHNVINKNPKDYKQNYYVENEENYLLAIYRGKDAKGKDVSDHKLCNLLNAVKSRQNKTGFYPDFKEKKGINLQLYKVLKIGKIVILQNDIQEDVFALPKEKLWKRMYRIAGLATSRNDIQIKLVHIIRETPWGYMKGEKDLNAGKECLLYGTANFKGLVEGQDFTVSPAGEIIQKARVC

SEQ ID NO: 116 - protein, 1340 aa, Enterococcus faecium
MKKEYTIGLDIGTNSVGWSVLTDDYRLVSKKMKVAGNTEKSSTKKNFWGVRLFDEGQTAEARRSKRTARRRLARRRQRILELQKIFAPEILKIDEHFFARLNESFLVPDEKKQSRHPVFATIKQEKSYHQTYPTIYHLRQALADSSEKADIRLVYLAMAHLLKYRGHFLIEGELNTENSSVTETFRQFLSTYNQQFSEAGDKQTEKLDEAVDCSFVFTEKMSKTKKAETLLKYFPHEKSNGYLSQFIKLMVGNQGNFKNVFGLEEEAKLQFSKETYEEDLEELLEKIGDDYIDLFVQAKNVYDAVLLSEILSDSTKNTRAKLSAGMIRRYDAHKEDLVLLKRFVKENLPKKYRAFFGDNSVNGYAGYIEGHATQEAFYKFVKKELTGIRGSEVFLTKIEQENFLRKQRTFDNGVIPHQIHLSELRAIIANQKKHYPFLKEEQEKLESLLTFKIPYYVGPLAKKQENSPFAWLIRKSEEKIKPWNLPEIVDMEGSAVRFIERMINTDMYMPHNKVLPKNSLLYQKFSIYNELTKVRYQDERGQMNYFSSIEKKEIFHELFEKNRKVTKKDLQEFLYLKYDIKHAELSGIEKAFNASYTTYHDFLTMSENKREMKQWLEDPELASMFEEIIKTLTVFEDREMIKTRLSHHEATLGKHIIKKLTKKHYTGWGRLSKELIQGIRDKQSNKTILDYLINDDDFPHHRNRNFMQLINDDSLSFKKEIKKAQMITDTENLEEIVKELTGSPAIKKGILQSLKIVDEIVGIMGYEPANIVVEMARENQTTGRGLKSSRPRLKALEESLKDFGSQLLKEYPTDNSSLQKDRLYLYYLQNGRDMYTGAPLDIHRLSDYDIDHIIPRSFTTDNSIDNKVLVSSKENRLKKDDVPSEKVVKKMRSFWYDLYSSKLISKRKLDNLTKIKLTEEDKAGFIKRQLVETRQITKHVAGILHHRFNKAEDTNDPIRKVRIITLKSALVSQFRNRFGIYKVREINEYHHAHDAYLNGVVALALLKKYPQLAPEFVYGEYLKFNAHKANKATVKKEFYSNIMKFFESDTPVCDENGEIFWDKSKSIAQVKKVINHHHMNIVKKTEIQKGGFSKETVEPKKDSSKLLPRKNNWDPAKYGGLGSPNVAYTVAFTYEKGKARKRTNALEGITIMEREAFEQSPVLFLKNKGYEQAEIEMKLPKYALFELENGRKRMVASNKEAQKANSFLLPEHLVTLLYHAKQYDEISHKESFDYVNEHHKEFSEVFARVLEFAGKYTLAEKNIEKLEKIYKENQTDDLAKLASSFVNLMQFNAMGAPADFKFFDVTIPRKRYTSLTEIWQSTIIHQSITGLYETRIRMGK

SEQ ID NO: 117 - protein, 1363 aa, Lactobacillus rhamnosus
MTKLNQPYGIGLDIGSNSIGFAVVDANSHLLRLKGETAIGARLFREGQSAADRRGSRTTRRRLSRTRWRLSFLRDFFAPHITKIDPDFFLRQKYSEISPKDKDRFKYEKRLFNDRTDAEFYEDYPSMYHLRLHLMTHTHKADPREIFLAIHHILKSRGHFLTPGAAKDFNTDKVDLEDIFPALTEAYAQVYPDLELTFDLAKADDFKAKLLDEQATPSDTQKALVNLLLSSDGEKEIVKKRKQVLTEFAKAITGLKTKFNLALGTEVDEADASNWQFSMGQLDDKWSNIETSMTDQGTEIFEQIQELYRARLLNGIVPAGMSLSQAKVADYGQHKEDLELFKTYLKKLNDHELAKTIRGLYDRYINGDDAKPFLREDFVKALTKEVTAHPNEVSEQLLNRMGQANFMLKQRTKANGAIPIQLQQRELDQIIANQSKYYDWLAAPNPVEAHRWKMPYQLDELLNFHIPYYVGPLITPKQQAESGENVFAWMVRKDPSGNITPYNFDEKVDREASANTFIQRMKTTDTYLIGEDVLPKQSLLYQKYEVLNELNNVRINNECLGTDQKQRLIREVFERHSSVTIKQVADNLVAHGDFARRPEIRGLADEKRFLSSLSTYHQLKEILHEAIDDPTKLLDIENIITWSTVFEDHTIFETKLAEIEWLDPKKINELSGIRYRGWGQFSRKLLDGLKLGNGHTVIQELMLSNHNLMQILADETLKETMTELNQDKLKTDDIEDVINDAYTSPSNKKALRQVLRVVEDIKHAANGQDPSWLFIETADGTGTAGKRTQSRQKQIQTVYANAAQELIDSAVRGELEDKIADKASFTDRLVLYFMQGGRDIYTGAPLNIDQLSHYDIDHILPQSLIKDDSLDNRVLVNATINREKNNVFASTLFAGKMKATWRKWHEAGLISGRKLRNLMLRPDEIDKFAKGFVARQLVETRQIIKLTEQIAAAQYPNTKIIAVKAGLSHQLREELDFPKNRDVNHYHHAFDAFLAARIGTYLLKRYPKLAPFFTYGEFAKVDVKKFREFNFIGALTHAKKNIIAKDTGEIVWDKERDIRELDRIYNFKRMLITHEVYFETADLFKQTIYAAKDSKERGGSKQLIPKKQGYPTQVYGGYTQESGSYNALVRVAEADTTAYQVIKISAQNASKIASANLKSREKGKQLLNEIVVKQLAKRRKNWKPSANSFKIVIPRFGMGTLFQNAKYGLFMVNSDTYYRNYQELWLSRENQKLLKKLFSIKYEKTQMNHDALQVYKAIIDQVEKFFKLYDINQFRAKLSDAIERFEKLPINTDGNKIGKTETLRQILIGLQANGTRSNVKNLGIKTDLGLLQVGSGIKLDKDTQIVYQSPSGLFKRRIPLADL

SEQ ID NO: 118 - protein, 1234 aa, Prevotella tannerae
MPNFWSIFTENLQTYLMKTRILGLDTGTNSLGWAVVDRDENNQYTPICRGDLIFTEGVKQEKGIEFSLAAERTSYRASRRHYFRRRLRKVEVLKVLVKHKLCPPLSDEALNRWHTKKEYPLDEDFILWQRTNEADNKNPYHDRHICLHRKLNLKDSQTDRYTLGRALYHLTQRRGFLSNRLDQNEEAEETGKVKSAISELSKEMKEAGCEFLGDYFYLLYRTEGNRVRIRSRYTDREKHYLQEFKEICRVQELDEDLAKALEKTIFFQRPLKSQRQGVGKCTMEKGHSRCAVSHPLYEEYRLLCYLNNIRIKTPSDDRLRPLNAEEREKITPLFYKEKNFDFEKIAKKLAGKTPFGWIRDAEDWPYQFNYRMTQEAPACPTTAQLIKVFGEDWKAALAETYTMSAKQDGTLKTEDEICTDIWNVLYSFSSKEKLKEFGLKKLQLDEVQAKAFSEIRLTRDFASLSLKAIRKILFFLRTGEDYSKAIFLANIPTIVGEEIWNDIERRSRLLYKVDLALRPQEERDAEEHRTIAERIKAAVAAEVPDAPIDLLYHPSMIEAYPDAKRNERFDCYQLGSPKTNAVRNPMAMRSLHMVRKVINHLLRKHIIDEKTEIHIEYARELNDANKRQAIADWQRELSKRHTAYAQNIRQLYKAETGLVIEPTKADILKYQLWEEQQHVCLYTGKKIGIADFLGANPKFDIEHTIPRSRGGDSTQENLTLCESKFNRDIKRDKLPTELANYEEILARIEHWKKQCYALKLKRDGIRTHSGLEKSIKDSRIRRRHLVGLEYGYLKGKYDRFTMKEVPEGFSRRQGAGIGLISKYAGLFLKSLFKDPKNPNRSNVYVVKGAITAEFRKLWGLQQADEAKSRENHTHHCIDAYTIACIGPCEYAALAAYYRSDEEFKYGRRREKPQFEKPWPTFTEDLLKLQEELLIVHQTTDKLGKRDRRKVKTPRGKFLTGGDSARGRLHQETYYGAINYDGNIKYVVRKPLDSLTEKDLDKIVDETVMGIVKGAVEAKGSLKEALADGIYMNKEKGILIKRVRIFSDVSEPINLKQLRDVSTKEYKRHIHLRKDENYLFAIYEGIDKKKNKKQTETATVDYLDAAKFYKDSKRRDKANSLVGDYSKKNKLPLKCILKKRQMVLFYEHSPEEIRFKDKKDLSRRLYIVTSIAKDGRVKFLHHQAATATGIQSSPSPFTNDGEHQPYYRLSASNIKVLVAGIDFDINILGEITPKL

SEQ ID NO: 119 - protein, 1496 aa, Prevotella veroralis
MKTILGLDLGTNSIGWAKVCVDDNGNYLRDIKLGSRIIPMSQDVLGNFDKGVTESQTSVRTGFRGVRRIRERSLLRRERLHRVLHVLGYLPPHYDSAIGWNKNEPSTYGKFLNHGEPKLAWEHKEDGSMRFLFMESFHEMMADFAKSQPSLVSDGKKIPLDWTIYYLRKKALSQPIRKEELAWLLLNFNQKRGYYQLRGEEDDDNPTKCEEYYELKVVGIEADEEGKNGNTWYNVKLENGWIYRRQSKIPLDDWIGKVREFIVTTEYEKDGITLKKDKNGDVKRSFRSPSEDDWGLRKKRTEKLLDSSKMTVGAFVYDHLLAEPSDKIRGKFIRTIERKYYKKELYAILCEQSKYHEELRSGDYLNKCAEELYKNNQPHRNSLLTKDLAYLLLEDLIFYQRPLKTKKSLIAECPYEAYKYVDKETGEIKRQGIKCIAKSNPYYQEFRLWQFISNLRLFNKADDKEVTADYLPTQDDYVRLFAYLNDRKEINQETLLKEFFKLKKITVNSEKVFPIRWNYIEDKEKKYPCNETRHELLLALDRARIDHSWLEKPGQEYRLWHLLYSVESKEETKEALRKLKDDDAFVESFLKVKPFKREYGAYSEKAIKKLLAVMRMGSLWRETDICDTTKGNITKILQGEIDEKLKEKISASVSSYNQLSDFQGLPVWLACYVVYGRHSEAAEIQHWKTPESLLAYINGFKQHSLRNPIVEQCILETLRTVHDIWKEVGHIDEIHVELGRNMKSTADQRARISENVLRNENTNLRIKSLLLELKNDPNIKDVRPYSPMQQEKLRIYEEGVLQELTKDDKDFTEITKISTMAQPSAKELQRYKLWLEQKYRSPYTGKSISLTKLFTSAYQIEHVIPQSRYFDDSFSNKVICESEVNSLKDNMLGYEFIKNHGGEIIHCTMLGDVKVLSESEYKAFVNDHYAHNKRKRENLLLEDIPQEFLNRQMNDSRYISKVVKALLSNIVRAEGEEEATSKFVVSCSGGITDRLKKDWGLNDVWNKIVYPRFERLNRLTGTEAFGQWENKDGKRVFQTAVPLELQRGFNKKRIDHRHHAMDALVIACTSRNIINYLNNESANNPKKREDLRQKLCDKNRTIRKPWETFTQDATAALEDVIVSFKNYVRIINKATNYYERYDVEGKKVIAEQRGDDMWAIRKPMHEATYYGRVNLRRKKKVNLRVALENISSICDNKLRIYINGLVEKGFNTKQILDKFKNTNDHFSMQKIDKVEIWQFTNEEEKLVATRKPLDTSFDTKKIASITDTGIQTILLNYLETKGGDSTIAFTPEGIVEMNQNISKYNNGKEHMPILKVRLYTKLGKKIPVGQTGCKAKQFVIAEAGTNLYFAIYEDEEGKRSYRTIPLNEVVERLKQGLSPVPEKNDKDVHLKFYLSPNDLVYVPIEDEHESLAKDHIYKFVDSSGTTANFIPHRSANVIFELNKKDAEKFCSGSIIQNEYGVGSSQSKNQKAITGEMIKAVCRKLEVDRLGNVIKVI

SEQ ID NO: 120 - protein, 1082 aa, Neisseria cinerea
MAAFKPNPMNYILGLDIGIASVGWAIVEIDEEENPIRLIDLGVRVFERAEVPKTGDSLAAARRLARSVRRLTRRRAHRLLRARRLLKREGVLQAADFDENGLIKSLPNTPWQLRAAALDRKLTPLEWSAVLLHLIKHRGYLSQRKNEGETADKELGALLKGVADNTHALQTGDFRTPAELALNKFEKESGHIRNQRGDYSHTFNRKDLQAELNLLFEKQKEFGNPHVSDGLKEGIETLLMTQRPALSGDAVQKMLGHCTFEPTEPKAAKNTYTAERFVWLTKLNNLRILEQGSERPLTDTERATLMDEPYRKSKLTYAQARKLLDLDDTAFFKGLRYGKDNAEASTLMEMKAYHAISRALEKEGLKDKKSPLNLSPELQDEIGTAFSLFKTDEDITGRLKDRVQPEILEALLKHISFDKFVQISLKALRRIVPLMEQGNRYDEACTEIYGDHYGKKNTEEKIYLPPIPADEIRNPVVLRALSQARKVINGVVRRYGSPARIHIETAREVGKSFKDRKEIEKRQEENRKDREKSAAKFREYFPNFVGEPKSKDILKLRLYEQQHGKCLYSGKEINLGRLNEKGYVEIDHALPFSRTWDDSFNNKVLALGSENQNKGNQTPYEYFNGKDNSREWQEFKARVETSRFPRSKKQRILLQKFDEDGFKERNLNDTRYINRFLCQFVADHMLLTGKGKRRVFASNGQITNLLRGFWGLRKVRAENDRHHALDAVVVACSTIAMQQKITRFVRYKEMNAFDGKTIDKETGEVLHQKAHFPQPWEFFAQEVMIRVFGKPDGKPEFEEADTPEKLRTLLAEKLSSRPEAVHKYVTPLFISRAPNRKMSGQGHMETVKSAKRLDEGISVLRVPLTQLKLKDLEKMVNREREPKLYEALKARLEAHKDDPAKAFAEPFYKYDKAGNRTQQVKAVRVEQVQKTGVWVHNHNGIADNATIVRVDVFEKGGKYYLVPIYSWQVAKGILPDRAVVQGKDEEDWTVMDDSFEFKFVLYANDLIKLTAKKNEFLGYFVSLNRATGAIDIRTHDTDSTKGKNGIFQSVGVKTALSFQKYQIDELGKEIRPCRLKKRPPVR

SEQ ID NO: 121 - protein, 1512 aa, Fibrobacter succinogenes
MKKILGLDLGTNSIGWAVVNADEITRDDGSRYLKPNGISAAGSRIIPMSADILGDFEKGNSISQTAERTRMRMARRLHERALLRRERLLRVLNLLDFLPKHFADKIDRYGKFTDDSEPKLAWRKNTEGKYEFIFQDAFNEMLAEFKDKQPEIVEEGKKIPYDWTIYYLRKKALEKALSKEELSWILLQFNQKRGYYQLRGEEEEIPQDKKIEYLAQKVVKVEATDQKKGDDVWYNVYLENGMIYRRTSKAPLDWEGKVKEFIVTTEVENDGETPKKDKEGNIKRSFRAPKEDDWTLLKKKTEADIENSHKTVGCYIYDSLLNNPKQKIIGKLVRTVERKFYKEELTQILKKQVELIPELRDDNLYKQCIEELYPINEAHRNTIAKTDFANLFINDILFYQRPLKSKKSQIDNCPYEERIFIDSKTGEKKKVPVKCIAKSNPLFQEFRLWQFIQNLRIYQREKEIDGKLLTDIDITSECLKSEEDYVRLFDWLNDRETIEQEDLLKHLFNTKKSKNKENPYRWNYVEDKVYPCNETRATILKGFSKCGINASVLSPELEMALWHILYSVEDKKEIETALTHFAQKQGWNDDFAKVFSKAKPFKKDYGSYSEKAIKKLLSLMRMGKYWNQDNIDKNTLDRIDKIINGEYDEKISNRVRDNAINLKDISDFRGLPVWLACYIVYDRHSEAKDCTKWNSPEEIDSYLKKFKQHSLRNPIVEQVVTETLRTVRDIWIQEEQIDEIHLELGRDLKNPADKRKKMSENILKNENTNLRIKAMLMEFMNPSMGIENVRPYSPSQQDILRIYEENALDNLTKDDKDFDFISKISKQAQPSKTDIIRYKCWLEQKYRSPYTGKTISLSKLFTPAYEIEHVIPQSLYFDDSFSNKVICEAEVNKLKDRQLGYKFIAEHHGEKVQLSQGEVVEILSVDAYEKFVKENYANNRIKMKKLLMESIPDEFIERQLNDSRYISKVVKGLLSNIVREKIDDENYEPEAVSKNLISCNGAITDRLKKDWGMNDVWNSIILPRFIRMNQITGKDCFTTTNAEGHLIPQMPLELQKGFNKKRIDHRHHAMDAIVIACTTRDHVNLLNNEAAHSKFNATRYQLQRKLRRFEKAVIDGKEREVAKEFLKPWDSFSSDSKNILENIIVSFKQNQRVINKTTNAFLHFDENGKKTFIKQGKGDSWAIRKSMHKDTVFGEINLRKVRSVSLNEAIKVPERVLNKKIKEKILELKNNKIDAKNIKKYIEENHTGGYGIDSSKIDVFYFTKETKERFFATRKTLDTSFNQAKIKDSIADSGIQKILLAHLKSKNGDAEQAFSPDGIDEMNKNIVELNNGKFHQPILKVRVYEKADKFAVGQKGNKKVKFVEAAKGTNLFFAIFEKDGKRSYLTIPLNVMIDCQKQYGNQWKNNIEAYLKEKELVEKDVKLQFILSPNDLVYLPTEGSIDKKRIYKVVSFTNNRLYAIPYAIAKSIVDKNEFTQLNKIEFTDNKESIKDACVPVIIDRLGNVIEFNGKRL

SEQ ID NO: 122 - protein, 1259 aa, Streptobacillus moniliformis
MKYILGLDLGVASIGWAVTEINEKGEPVGLIDANSVIFKPLDNDKGKLYNVERRDKRGSRRILRRKKHRVERTKMLLVNSSFLTNEEIDNLYVGKLDNIYEVRLKGLKEQLSKNEIARLMIYYCKNRGFKSNRKTEDLEILKSLGEKISEKDSDEKKLKPIIAKNTELIESKGLTPIEVIYMIRENDNSILGFKNKEGNYKFGFKRNQVIDEVRKILGTQQILSKEIVDEYIDILSSQRDFSDGPGGDSKYKIDYTKLAGKCKYTGEVRAVKSAPSYEIFTMLQKLNDIRYVKFTSEDKIEKKKLSKEVIHKLYDLVVEKNKTLTYDLIEKSIDEENIKLLNIPKLSKSKYVELRKSYFKERNDNENLTEEEINAFNEKLNNERMKQELIRNNLKAYKELKSKFKKNNIDENRIKELGGIYFLDLVAELLTYSKTDEKLEYFVENVERYSLFKEQRDIVEIIKTFPNYTKNGNLSLSLVRELNKLLMEGHDYESSLSSLNYYIDTDVDWEKFPTISEIEDSLSTKITNPNVKHILVILRKLYNTLLFKYGRPEKVHLELSRDFSNDFSTRNKIQKEQLENKVRREVAAFEMYGANKDIVAGKDRLSNDDFVRIKLWEEQNKVCMYSGRTIEKYQLTSAEVQIDHILPYSKSFDNSYSNKVLVFSNENQDKKERTPYQWLKGTEKWNEFKQRVRLNLNISNKKKENLLFEDEVVNNEFLERELHATSYSSRLALNIFQRLIPVSDEDKYDEHGNEKVKYLYNRNVIAFQGKMTSMLRNLYSLNKYTHSFESDTLDIDNKAFILKEFEINKDNLKMTAYNVNTGLEITSETKVEKNKSGEFKTIKDELLKKELDKKENLIEISDYFKDKVLFDLKIVDFEEIDTVEPEIISILYKMITALKEEVYSKNRENHLHHSLDAFLLTIMNRSMQMKLIKYNQLISVLKNKEIEIFNEEKGEYIDSKEFAEELQKQKIIDIDGNERGIKFNVNGKTHRLNLVKPYENFLDDIKNKIFDKRENNKLPYHVVKSKVSGALHAETILGESKGEITKRISVFDINYKNLGKIFDKDGSQKEIYETLVKWLEAKSKDYPKLKNGNIIKKVKIVDGNKDKLIKLGNKRYVEMGRTTVKILVLKKEAEEGLKFASIGRYKYNLLKSEKDVNISIWKDAIHFCKVRYNKLKENGYRLIHELIPGETIELELNKGNISKCLVVGFSGGKIEISSVIGDALDLINDKISTRIKERYYITVSTIKSIKKINKNILGD

SEQ ID NO: 123 - protein, 1091 aa, Mobiluncus mulieris
MDSRKYRVGIDVGTNSVGFAAVEEDDSGSPTRFLNTMVVIHDSGVDPEQKKYAITRLASAGTARRTRRLYRTRRQRLRELDDFISNELGYPLVNLENFADPYEPWKVRADLATTKLPNDELPEAMSIALRHMARHRGWRSPYQRVEALHLHAEISKEFAALKERVVEKTGDVFSDDATPAEVLVDLMGRQKVRGADGVLSGKLRQSDNANELRKIASVQGIDDETLNRIIDRVFSSKSPKGKASERVGMDALPGQGSKPRALKAMPSFQKFRVVSVICNLRIKDSGGDARPLSMEEKEKLIDYLMSSTTDDHVTWTDVADLLHVKRSQLQGTAKEGFDGERPYTRPPVNSTWSKIKDSKIKSLVALWKTGDVDVQSAIVEALSNASVLEDSRPGADIVVAYLESLDDKELESLDKVGLPAGRASYSEDSLERLTERMLRDDCDLFEARKREFNVADDWKPPADPIYAPVGNPGVDRVLKIVNRLLMAAEREWGAPTQINIEHVRSGFSSELMQREFERENERRRAQNEEAVKAILTEKGGNSRVSKYDITRYYAVKRQHCQCLYCGTPITFSDCELDHIVPRKGVGSTNTRVNLAAACRSCNRDKSNLPFAVWAGKASNFDVSIDDAVSRVKQWQRSQNEGVREFRAFQNEVISRLLKTTEDPEIDSRSLESVAWMARELHHRVEYYFQSKGAQTQVSVYRGAVTAQARKSSGLEDKVKMIGGGGKTRLDRRHHAMDAATIALMTPGISTTLSEKNNLRDAQKFTGQSETWKDYCGRTETARKHFAVWKSNMERLTDLFNDKLENDAIPVVQPLRLRLSNSKAHDDGIGKLDSKKLGSVWSLADIDRAATPQIWTALTRCDDFDPTKGLPENANRVIRAQGVKYESEDNIPVFPSNVAAIAVRDGYAEIGSTIHHARIYRIDDGKKTFYSMIRVFAVDLLKHQAEDLFTVKLPPSAISIRTCEDSLRRALSNGTAEYLGWLVPGDEIIVDTSDKAFHTGQIGDLLRNFPVNSFRLTGFPSNSRLRLKPVLLAGEGLRDDAEDSIKKILLGQGWRPAINVLFSKGKPRIVRRNSLGIERPSSNNGLPFSWEA

SEQ ID NO: 124 - protein, 872 aa, unidentified
  source 1..872: note = Candidatus Parvarchaeum
MLGSSRYLRYNLTSFEGKEPFLIMGYYKEYNKELSSKAQKEFNDQISEFNSYYKLGIDLGDKTGIAIVKGNKIILAKTLIDLHSQKLDKRREARRNRRTRLSRKKRLARLRSWVMRQKVGNQRLPDPYKIMHDNKYWSIYNKSNSANKKNWIDLLIHSNSLSADDFVRGLTIIFRKRGYLAFKYLSRLSDKEFEKYIDNLKPPISKYEYDEDLEELSSRVENGEIEEKKFEGLKNKLDKIDKESKDFQVKQREEVKKELEDLVDLFAKSVDNKIDKARWKRELNNLLDKKVRKIRFDNRFILKCKIKGCNKNTPKKEKVRDFELKMVLNNARSDYQISDEDLNSFRNEVINIFQKKENLKKGELKGVTIEDLRKQLNKTFNKAKIKKGIREQIRSIVFEKISGRSKFCKEHLKEFSEKPAPSDRINYGVNSAREQHDFRVLNFIDKKIFKDKLIDPSKLRYITIESPEPETEKLEKGQISEKSFETLKEKLAKETGGIDIYTGEKLKKDFEIEHIFPRARMGPSIRENEVASNLETNKEKADRTPWEWFGQDEKRWSEFEKRVTSLYSKKKISERKREILLNKSNEYPGLNPTELSRIPSTLSDFVESIRKMFVKYGYEEPQTLVQKGKPIIQVVRGRDTQALRWRWHALDSNIIPEKDRKSSFNHAEDAVIAACMPPYYLRQKIFREEAKIKRKVSNKEKEVTRPDMPTKKIAPNWSEFMKTRNEPVIEVIGKVKPSWKNSIMDQTFYKYLLKPFKDNLIKIPNVKNTYKWIGVNGQTDSLSLPSKVLSISNKKVDSSTVLLVHDKKGGKRNWVPKSIGGLLVYITPKDGPKRIVQVKPATQGLLIYRNEDGRVDAVREFINPVIEMYNNG

SEQ ID NO: 125 - protein, 1229 aa, Pediococcus acidilactici
MGDRKYNLGLDIGTSSIGFAAVDENNQPIRVKGKTAIGVRLFEEGKTAADRRGFRTTRRRLSRRRWRINLLNEIFDAHLAEVDPTFLARLKESNRSNLDPKKSFQGSLLFPERKDYQFYEEYPTIYHLRKALMEKDRKFDIREIYLAVHHIIKYRGNFLNGTPMRSFKVENIELNTLFDQLNQLYAEIVPDNELAFDLAQVADVKDVLSSTTIYKMDKKKQLVKMMLLPASNKALQSENKKIVTQFVNAILNYKFKLDVLLQVETDADWSLKLNDEGADDKLEEFTGDLDENRLEIIDLLQRLHNWFSLNEITKDGNSLSAAMVEKYENHHHHLGLLKKVIENHPDAKKAKALKETYTAYVGKTDDKTQNQDDFYKAVEKNLDDSPDAKGIKRLIQLDQFMPKQRTGQNGAIPHQLHQQELDQIIEKQSKYYPFLAEPNPNVKRRKDAPYKLDELIAFKIPYYVGPLVTPEEQAQNKENVFAWMKRKAAGPITPWNFDEKVDRMESANRFIRRMTTKDTYLFGEDVLPAESMIYQKFVVLNELNNLKINGRHLSLKDKQDVYNDLFKQQKTVSIKALQNYYVTKKKAATAPTVGGLADPKKFLSSLSTYIDFKNMFGERVNDPQFQEDLEQIVEWSTIFEDRGIFKAKLQALGWLSEKQIQQLVAKRYKGWGRLSKKLLTGLKNAEGYSILDEMWRSTENFMQIQSRPEFAALIQQANEKQFEGNDPDNVWENIENILGDAYTSPQNKKAIRQVVKVVQDIEKAVGNPPEKIAIEFTREAAANPQRTQSRLRTLEKLYESAEEVVDAGLTAELAEFKENKHVLSDKYYLYFTQLGRDVYTGDTISLDKLNDYDVDHILPQSFIKDDSLDNRVLTIRAVNNGKSDNVPAKMFGKKMGSFWRHLLDNGMISKRKYNNLITDPDNISKYAQKGFINRQLVETSQVIKLTANILNGIYDKDTEIIEVPAKMNSQMRKMFDLVKVREVNDYHHAFDAYLTIFIGNYLYKCYPKLRPYFVYDNFKKFGNKEDIGHKRFNFLGKIEREKKVVAPETGEILWSNVAPNETIKQIKKVYNYKFMIVSREITTRRAELFNQTVYPKNYRGKLIPIKEDRPTDLYGGYSGNTDAYLAIVALEDKKKGKYFKVVGIPTRAAAKLEKLKQQDSQQYLQALHEVIAPQFTKSTKKGIKKTEFEIVLDKVHYRQLVQDGPVKMMLGSSTYKYNAKQLVLSEKAL

SEQ ID NO: 126 - protein, 1398 aa, Veillonella parvula
METQASNQLISSHLKGYPIKDYFVGLDIGTSSVGWAVTNKAYELLKFRSHKMWGSRLFDEGESAVARRGFRSMRRRLERRKLRLKLLEELFADAMAQVDPTFFMRLRESKYHYEDKTTGHSSKHILFIDKNYNDQDYFKEYPTVYHLRSELMKSGTDDIRKLFLAVHHILKYRGNFLYEGATFDSNASTLDDVIKQALENITFNCFDCNSAISSIGQILMEAGKTKSDKAKAIEHLVDTYIATDTVDTSSKTQKDQVKEDKKRLKAFANLVLGLNASLIDLFGSVEELEEDLKKLQITGDTYDDKRDELAKAWSDEIYIIDDCKSVYDAIILLSIKEPGLTISESKVKAFNKHKDDLAILKSLLKSDRSIYNTMFKVDEKGLHNYVHYIKQGRTEETSCNREDFYKYTKKIVEGLSDSKDKEYILSQIELQILLPLQRIKDNGVIPYQLHLEELKAILAKCGPKFPFLNEVADGFSVAEKLIKMLEFRIPYYVGPLNTHHNVDNGGFAWAVRKASGRVTPWNFDDKIDREKSAAAFIKNLTNKCTYLLGEDVLPKSSLLYSEFMLLNELNNVRIDGKPLEKVVKEHLIEAVFKQDHKKMTKNRIEQFLKDNGYISETHKHEITGLDGEIKNDLASYRDMVRILGDGFDRSMAEEIITDITIFGESKKMLRETLRKKFASCLDDEAIKKLTKLRYRDWGRLSQKLLNGIEGCDKAGDGTPETIIILMRNFSYNLMELLGDKFSFMERIQEINAKLTEGQIVNPHDIIDDLALSPAVKRAVWQALRIVDEVAHIKKALPARIFVEVTRSNKNEKKKKDSRQKRLSDLYAAIKKDDVLLNGLNNEIFGELKSSLAKYDDAALRSKKLYLYYTQMGRCAYTGEIIELSLLNTDNYDIDHIYPRSLTKDDSFDNLVLCKRTANAQKSDAYPISEEIQKTQKPFWTFLKQQGLISERKYERLTRITPLTADDLSGFIARQLVETNQSVKAATTLLRRLYPGVDVVFVKAENVTDFRHDNNFIKVRSLNHHHHAKDAYLNIVVGNVYHERFTRNFRAFFKKNGANRTYNLAKMFNYDVNCTNAKDGKAWDVKTSMDTVKKMMDSNDVRVTKRLLEQTGALADATIYKATVAGKAKDGAYIGMKTKSSVFADVSKYGGMTKIKNAYSIIVQYTGKKGEVIKEIVPLPIYLTNRNTTDQDLINYVASIIPQAKDISIIYGKLCINQLVKVNGFYYYLGGKTNSKFCIDNAIQVIVSNEWIPYLKVLEKFNNMRKDNKDLKANVVSTRALDNKHTIEVRIVEEKNIEFFDYLVSKLKMPIYQKMKGNKAAELSEKGYGLFKKMSLEEQSIHLIELLNLLTNQKTTFEVKPLGITASRSTVGSKISNQDEFKVINESITGLYSNEVTIV

SEQ ID NO: 127 - protein, 1485 aa, Prevotella bivia
MKNILGLDLGTNSIGWAKISIDDNGKYIKDSIKLGSRIIPMSQDVLSNFSKGVTLSQTSERTSFRGARRLRERTLLRRERLHRILHLLGFLPKHYEKAIGWDRNDNKTYGKFINHAEPKLAWCKDNNGKMRFLFMDSFHDMLSEFSEKHPELLANGKKIPLDWTIYYLRKKALYKAITKEELAWILLNFNQKRGYYQLRGEEDRDSEANKKEYLELKVIGVEATGEKKGNDIWYNIHLENGWIYRRSSKNPLNDWLGKVKSFIVTTDLDADGNPKKDKDGNIKRSFRAPSEGDWTLIKKRTESLLENSGQTVGQFIYNHILEEPSAKIRGNFIRTIERKYYKDELKAILEKQKEFHHELSSESLLTECAKELYKRNIAHQEVLLKKGIIHLLLNDILFYQRPLKIKKSLIDNCPYENYKYVDKKSGDIKVKSIKCIAKSNPFFQEFRLWQFVSNLRLYRKSDDKDVTSEHLVTTDDYANLFTYLNNRKDIKQSVLLKEYFKIKKVKTINGAEYPVRWNYIDDDNKTYPCNETRYDILHALSKTELKSEWLTPERTYRLWHLLYSIESKEETKKALNKLNLSDDFTEAFLTIKPFKKEYGSYSEKAIKKLLSLMRMGYLWSEDEAIKQVGAEIEKTIEGELPDYVLQRLEKSQHNYNKISDFSGLPLWLASYIIYGRHSEAKEIIHWDNPESMMAYIKDFRQHSMRNPIVEQCVLETLRTVHDIWKEIGHIDEIHIELGREMKSTSEQRKAITQNVLHNQNTNIRIKLLLQELKNDNNITGVRPYSPMQQEILRIYEEGALQGLTKEDKDYNDILKISQTAQPTSNELTRYKLWLEQKYRSPYTGKAISLSKLFTSAYQIEHVIPQSRYFDDSLSNKVICESEVNTLKKAMLGMEFIKTCGGQKVHCTLLGDVEIYNEEDYKAFVNEHYSNNRTKRNKLLMEDIPQEFINRQLNDSRYISKMVKQLLSAIVRGQEEVEATSKFVIPCTGGITDRLKKDWGLNDIWNNLVSPRFQRMNALTGSEYFGHWENKEGKRVFQTTMPIQLQQGFSKKRIDHRHHAMDALVIACASRNIISYLNNETAQDTERRRDLRQKLCDKGGSVRKPWDSFTQDTQYALKDIIVTFKNYVRIINKATNYYEHYKTDGKKGMISQKGDELWAIRKPMHKETVFGKVNLRRPKRVSLSKAIDSVDIICNRKLKKYIKARLNEGLQKKQILNIFKELNNVWEGIDVNKIDIWEMSNDKEPMVATRKQLDTSFDEKKIRSISDTGIQKILLNYLITKNNNPELAFTPEGIQEMNSNISEYNDHKKHQPIYKVRVTEPLGAKYPIGTMGNNPKKFVEAQAGTNLYFAIYEDKEGKRNYDTIPLNIAAERLNQQLSPVPETNENNTPLKFYLSPNDLVYVPSEEERHSGNNIQLDKNRIYKMVSSTSKRCFFIHHRVAISLVDKKEFSAQNKMERSIDNEQVMIKSVCWKLITDRLGNIIKVIK

SEQ ID NO: 128 - protein, 1218 aa, Prevotella buccalis
MNKRILGLDTGTNSLGWAVVDWDEHAQSYELIKYGDVIFQEGVKIEKGIESSKAAERSGYKAIRKQYFRRRLRKIQVLKVLVKYHLCPYLSDDDLRQWHLQKQYPKSDELMLWQRTSDEEGKNPYYDRHRCLHEKLDLTVEADRYTLGRALYHLTQRRGFLSNRLDTSADNKEDGVVKSGISQLSTEMEEAGCEYLGDYFYKLYHEQGNKVRIRQRYTDRKKHYQHEFDAICEKQELSSELIEDLQRAIFFQLPLKSQRHGVGRCTFERGKPRCADSHPDYEEFRMLCFVNNIQVKGPHDLELRPLTYEEREKIEHLFFRKSKPNFDFEDIAKELAGKKNYAWIHDKEERAYKFNYRMTQGVPGCPTTAQLKSIFGDDWKTGIAETYTLIQKKNGSKSLQEMVDDVWNVLYSFSSVEKLKEFAHHKLQLDEENAEKFAKIKLSHSFAALSLKAIRKFLPFLRKGMYYTHASFFANIPTIVGKEIWNNEQSRKYIMENVGELVFNYQPKHRDVQGTIEMLIKDFLANNFELPAGATDKLYHPSMIETYPHALRNEFGILQLGSPRTNAIRNPMAMRSLHVLRRVVNQLLKESIIDENTEVHVEYARELNDANKRRAIADRQKEQDKQHKKYGDEIRKLYKEETGKDIEPTQTDVLKFQLWEEQNHYCLYTGEQIGITDFIGSNPKFDIEHTIPQSVGGDSTQMNLTLCDNRFNREVKKAKLPTELANHEEILTRIEPWKNKYEQLVKERDKQRTFAGMDKAVKDIRIQKRHKLQMEIDYWRGKYERFTMTEVPEGFSRRQGTGIGLISRYAGLYLKSLFHQADSRNKSNVYVVKGVATAEFRKMWGLQSEYEKKCRDNHSHHCMDAITIACIGKREYDLMAEYYHMEETFRQGRGSKPKFSKPWATFTEDVLNIYKNLLVVHDTPNNMPKHTKKYVQTSKGKVLAQGDTARGSLHLDTYYGAIERDGEIRYVVRRPLSSFTNPKELENIVDETVKRTIKEAIADKNFKQAIAEPIYMNEDKGILIKKVRCFANSVKQPINIRQHRDLSKKEYKQQYHVMNENNYLLAIYEGLVKNKVVREFEIVSYIEAAKYYKRSQDRNIFSSIVPTHSTKYGLPLKTKLLMGQQVLMFEENPDEIQVDNTKDLVKRLYKVVGIEKDGRIKFKHHQEARKEGLTIYSTPYKNNDDYVPIFRQSIKNINILVDGIDFNIDILGKVTLKE

SEQ ID NO: 129 - protein, 1218 aa, Prevotella timonensis
MNKRILGLDTGTNSLGWAVVDWDEHAQSYELIKYGDVIFQEGVKIEKGIESSKAAERSGYKAIRKQYFRRRLRKIQVLKVLVKYHLCPYLSDDDLRQWHLQKQYPKSDELMLWQRTSDEEGKNPYYDRHRCLHEKLDLTVEADRYTLGRALYHLTQRRGFLSNRLDTSADNKEDGVVKSGISQLSTEMEEAGCEYLGDYFYKLYDAQGNKVRIRQRYTDRNKHYQHEFDAICEKQELSSELIEDLQRAIFFQLPLKSQRHGVGRCTFERGKPRCADSHPDYEEFRMLCFVNNIQVKGPHDLELRPLTYEEREKIEPLFFRKSKPNFDFEDIAKALAGKKNYAWIHDKEERAYKFNYRMTQGVPGCPTIAQLKSIFGDDWKTGIAETYTLIQKKNGSKSLQEMVDDVWNVLYSFSSVEKLKEFAHHKLQLDEESAEKFAKIKLSHSFAALSLKAIRKFLPFLRKGMYYTHASFFANIPTIVGKEIWNKEQNRKYIMENVGELVFNYQPKHREVQGTIEMLIKDFLANNFELPAGATDKLYHPSMIETYPNAQRNEFGILQLGSPRTNAIRNPMAMRSLHILRRVVNQLLKESIIDENTEVHVEYARELNDANKRRAIADRQKEQDKQHKKYGDEIRKLYKEETGKDIEPTQTDVLKFQLWEEQNHHCLYTGEQIGITDFIGSNPKFDIEHTIPQSVGGDSTQMNLTLCDNRFNREVKKAKLPTELANHEEILTRIEPWKNKYEQLVKERDKQRTFAGMDKAVKDIRIQKRHKLQMEIDYWRGKYERFTMTEVPEGFSRRQGTGIGLISRYAGLYLKSLFHQADSRNKSNVYVVKGVATAEFRKMWGLQSEYEKKCRDNHSHHCMDAITIACIGKREYDLMAEYYRMEETFKQGRGSKPKFSKPWATFTEDVLNIYKNLLVVHDTPNNMPKHTKKYVQTSIGKVLAQGDTARGSLHLDTYYGAIERDGEIRYVVRRPLSSFTKPEELENIVDETVKRTIKEAIADKNFKQAIAEPIYMNEEKGILIKKVRCFAKSVKQPINIRQHRDLSKKEYKQQYHVMNENNYLLAIYEGLVKNKVVREFEIVSYIEAAKYYKRSQDRNIFSSIVPTHSTKYGLPLKTKLLMGQLVLMFEENPDEIQVDNTKDLVKRLYKVVGIEKDGRIKFKYHQEARKEGLPIFSTPYKNNDDYAPIFRQSINNINILVDGIDFTIDILGKVTLKE

SEQ ID NO: 130 - protein, 1487 aa, Prevotella timonensis
MKNILGLDLGSNSVGWALVKVEENGNPIGSIKMGSRIIPMSQDILGSFEKGDTVSQTAQRTLYRGKRRLIERHVLRRERLCRVLHIMNFLPAHFDRLLGWDKTDNKTYGKFIDDSEPKLAWRQNKNEMGKMEFVFMDSFHEMLSDFAKHQPQLIANGKKVPLDWTIYYLRKKALTQLISKEELAWILLNFNKKRGYYQLRGEEEEEQPTKKEEYKVLKVISVDADEGQKGNGIWYNIHLEDGGIYKKKSDIPLYDWVGKTLQLIVVTTYEKDGKTPKIFDSGKQNPSYRLPKEDDWGLVKKRTESQLQSSGKTVGAFIYDNILSKPDDKIRGNLVRTIERKYYKKELIEILQQQAKYHDELHNQNLLESCAKELYAHNDVHYNEVIKSNMINLLVNDIIFYQRPLKSKKSLIANCKYESYEYVDKETGEIKEMPIKCIAKSNPYYQEFRLWQFIHNLRLSDVVTREDVTAQYLSTPQDYCNLFTYLNDRKEIKQDILLKDFFKIKKVQIDKEKVFPIEWNYIKDATKSYPCNETRYELLSALKRAGMDKQWLDDTPNMQYRLWHLLYSVEEKEESAKALRKLYDDDKFVTSFLKIKPFNKCYGAYSEKAIKRLLTLMRMGKAWNEQAIDAKTLKCIQQIITDNVDSKLKEKIDDSRYVLHHVSDFQGLPTYLASYVIYGRHSEVTDIQCWDSPEDLLKFIRDFKQHSLRNPIVEQVILETLRVVYDIWKAEKHIDEIHVEVAREMKLTAQQRNEANLRNLNNEATNLRIKYLLEELKNDTFIKDVRPLSPIHQEKMRIYEQAVLGNLNKQDKDYDDIIKISKKEHPTNAELIRYKLWLEQRYCSPYTGKAISLSKLFTTAYEIEHIIPQSRYFDNSFNNKVICEAEVNKAKGNMLGYEFIKKQGGQKIYCTQLGKAVTILKEEAYKQFVNEHYAHNKRKRDNLLAENIPESFSSRQLNDTRYITKTIMSLLSNVVRQQSEEEATAKNLLPSSGSVTDRLKNDWGLKDVWNTIVTPRFERLNKLSGTNDFGEMKEENGNRYFQTNVPLEYEKGFKKKRIDHRHHAMDALVIACTTRNMVNYISNANANSPKQREDLRQLLCDKNRIINKPWDTFTQDALKALNDIVVSFKNNVRIINRATNRYQRYDKNGKKIIFSQKGDDMWAIRKSMHKETVFGRVNLIRKEVLPIAKALDNISAICNAQLRAYVNDLVDKHFNKKQLVAHFKSLNYKWNRQDVSKVEVWISSDNKTPMVAVRKPLDTSFDKKKIASITDTGIQTILLNYLESKGGDASVAFAPEGIQEMNSNIELYNNGKAHKPIKNVRLSEPLGAKYQVGERGAKTKKYVEADKGTNLFFAIYEDEEGKRYYYSVPLREAIERQKQKLSPVPEYNEKGVALKFYLSPNDLVYVPTEEERTMGTCHIDKARIYKMVSSTGCSCYFVPSTFAKVIVDKVELQSLNKMEKAITDECIKEVCWKLKVDRLGNIINVIK

SEQ ID NO: 131 - protein, 1138 aa, Bifidobacterium dentium
MLCRCHRRYRIGIDVGLMSVGLAAIEVDETGFPIRILNIQSVIHDGGIDPQLGKKKSISRKAISGVARRTRRMRRRKVVRLRQLDATLESLGFPIVEPDSLDTWEIWLTRAKLASSYIQDDETRKEDVSIALRHIARHRGWRNPYSNVESLFVDVAPSEQYEELRRKAEEKLGTSLSGNPTSAEIVECILKRQVGEVQLRTRSRKGVNGNAVEKEGLLPTKLMQSDNAAEIRRIFKVQRIDDETGRKLLRAVFKACSPKGSVERRVGRDALAPGLPRALKASLAFQEYRIANVLTNLVISEDGTKRKLTIAEKQRVFGFLSSNETDDITWIDVAEKLGLERRQIQGVGCLTADGEERISSTPPRNITALHIHSAKPVIREKLVAWWKAASPTVRETMVELLSNTVDIDRVREDMDYSSAVAFIDSLGDEELTALDSVDLLSGRAAYSRQTLKQLTERMLNTDDDLHEARKAVFGVDDNWKPPVDAISTSVGNPAVDRVLKIVNRYLLACQKRWRNPQSVQIEHVRESFSSVAKAKETERVQGERARYRNDLRRELCEQEGLNKIRESDIRRWESVQRQNGTCLYCGSPITFRTCEMDHIVPRKGVGSTNTRVNLAAACAACNKLKSNTAFSVWARTEGAANRKVSQRDAIERVKTFIFNKSVPPREQRAFKQAVISRLRQAESDPAIDNRSIESVAWMADELHRRIEAYFNQDADVSGNTPATQVWVFQGRVTALARKASGIEGRIHFAGEWKKTRLDRRHHAVDAAVIAMMNHSAAQTLVERDSLRLSQWITRKPETWKNYPFSEGQKKTRFKEWLDCMNALLDLLNDALDSDRVPVTRCQRMSLGNSQAHAATIRKMKRVELFSPMDADLIRRASTPALYCALTRLPEYSPEKGLPENRGREIVLNGRHIRSTETVDFFASGAAQLMVRNGSAEIGDSIHHMRIYRYRKTGAKSQEYVYGMIRVFQIDLLHASSENLFAVQLPSQSVSVRYGDKNVVQAIQEGRAEYLGHIVPNDEILISYEGVRMKDSEKIGAYANDFSGTASELAQRRHWVVVGSDVSKLALRPSYLSEEGLENSGSESERLSKQTRKVIEGKGWVVAVNILAKYHPVVIRRNALGEPRFRTNSGMPVSWRWDR

SEQ ID NO: 132 - protein, 587 aa, Neisseria subflava
MATSRSRIRSQTDAFGVVGSLVAFNQTSRLFVAKKNEGETADKELGALLKGVADNAHALQTGNFRTPAELALNKFEKESGHIRNQRGDYSHTFNRKDLQAELNLLFEKQKEFGNPHVSDGLKEGIETLLMAQRPALSGDAVQKMLGYCTFEPTEPKAAKNTYTAGRFIWLTKLNNLRILEQGSERPLTTTERATLMDEPYRKSKLTYAQARKLLGLEDTAFFKGLRYGKDNAEASTLMEMKAYHAISRALEKEGLKDKKSPLNLSPELQDEIGTAFSLFKTDEDITGRLKDRVQPEILEALLKHISFDKFVQISLKALRRIVPLMEQGKRYDEACAEIYGDHYGKKNAEEKIYLPPIPADEIRNPVVLRALSQARKVINAVVRRYGSPARIHIETAREVGKSFKDRKEIEKRQEENRKDREKAAAKFREYFPNFVGEPKSKDILKLRLYEQQHGKCLYSGKEINLGRLNEKGYIEIDHALPFSRTWDDSFNNKVLVLGSENQNKGNQTPYEYFNGKDNSREWQEFKARVETSRFPRSKKQRILLQKFDEDGIYRIGVKTALSFPKYQIDELGKEIRPCRLKKRPPVR

SEQ ID NO: 133 - protein, 1269 aa, Mycoplasma gallisepticum
MNNSIKSKPEVTIGLDLGVGSVGWAIVDNETNIIHHLGSRLFSQAKTAEDRRSFRGVRRLIRRRKYKLKRFVNLIWKYNSYFGFKNKEDILNNYQEQQKLHNTVLNLKSEALNAKIDPKALSWILHDYLKNRGHFYEDNRDFNVYPTKELAKYFDKYGYYKGIIDSKEDNDNKLEEELTKYKFSNKHWLEEVKKVLSNQTGLPEKFKEEYESLFSYVRNYSEGPGSINSVSPYGIYHLDEKEGKVVQKYNNIWDKTIGKCNIFPDEYRAPKNSPIAMIFNEINELSTIRSYSIYLTGWFINQEFKKAYLNKLLDLLIKTNGEKPIDARQFKKLREETIAESIGKETLKDVENEEKLEKEDHKWKLKGLKLNTNGKIQYNDLSSLAKFVHKLKQHLKLDFLLEDQYATLDKINFLQSLFVYLGKHLRYSNRVDSANLKEFSDSNKLFERILQKQKDGLFKLFEQTDKDDEKILAQTHSLSTKAMLLAITRMTNLDNDEDNQKNNDKGWNFEAIKNFDQKFIDITKKNNNLSLKQNKRYLDDRFINDAILSPGVKRILREATKVFNAILKQFSEEYDVTKVVIELARELSEEKELENTKNYKKLIKKNGDKISEGLKALGISEDEIKDILKSPTKSYKFLLWLQQDHIDPYSLKEIAFDDIFTKTEKFEIDHIIPYSISFDDSSSNKLLVLAESNQAKSNQTPYEFISSGNAGIKWEDYEAYCRKFKDGDSSLLDSTQRSKKFAKMMKTDTSSKYDIGFLARNLNDTRYATIVFRDALEDYANNHLVEDKPMFKVVCINGSVTSFLRKNFDDSSYAKKDRDKNIHHAVDASIISIFSNETKTLFNQLTQFADYKLFKNTDGSWKKIDPKTGVVTEVTDENWKQIRVRNQVSEIAKVIEKYIQDSNIERKARYSRKIENKTNISLFNDTVYSAKKVGYEDQIKRKNLKTLDIHESAKENKNSKVKRQFVYRKLVNVSLLNNDKLADLFAEKEDILMYRANPWVINLAEQIFNEYTENKKIKSQNVFEKYMLDLTKEFPEKFSEFLVKSMLRNKTAIIYDDKKNIVHRIKRLKMLSSELKENKLSNVIIRSKNQSGTKLSYQDTINSLALMIMRSIDPTAKKQYIRVPLNTLNLHLGDHDFDLHNMDAYLKKPKFVKYLKANEIGDEYKPWRVLTSGTLLIHKKDKKLMYISSFQNLNDVIEIKNLIETEYKENDDSDSKKKKKANRFLMTLSTILNDYILLDAKDNFDILGLSKNRIDEILNSKLGLDKIVK

SEQ ID NO: 134 - protein, 1354 aa, Prevotella melaninogenica
MADFAKYQPGMVADGRKIPLDWTLYYLRKKALTQAIRKEELAWILLNFNQKRGYYQLRGEEEEENSTKHEEYYELKVVSVEAAEEGKGGNTWYNVTLENGWIYRRQSKIELNDWVGKVRPFIVTTEYEIDGVTIKKDKNGEVKRSFRAPSENDWGLRKKRTESLLEESGKTVGAFIYNHILSEPADKIRGNFIRTIERKFYKKELEAILREQSKHQKELKDIDTLIACIKELYPNNKPHQDSLIKKDMTYLLITDLIFYQRPLKSKKSLIADCPYEYYEYVIKETGENKRQSIKCIAKSNPYYQEFRLWQFIINLRLFDRNNDKEVTSEYLSSMEDYTRLFTYLNDRKDINQETLLKDFFKQKKVKRGMEKEFPIRWNYIEDKEKKYPCNETRHELLTALGKVGIDHSWLDDKELFYRLWHLLYSVESKEEAEGALRKLVDNDDFVNAFLKIKPFKKEYGAYSEKAIKKLLAVMRMGNLWNEVDICEQTRDRIQNIIKGDIDEKIKDRMGRTFSQLSDFQGLPEWLACYVVYGQHSEATDIQRWTKPENLMAYINGFKQHSLRNPIVEQCILETLRTVHDIWKEAGHIDEIHIELGRGMKSTADQRARMSKSIMQNENTNLRIKSLLMELKNAKEFENVRPYSPMQQEILRIYEEGALQELTKEDAQYNEISKISQMAQPSANELLKYRLWLEQKYCSPYTGKPISLSKLFTSAYQIEHIIPQSRYFDDSFTNKVICEAEVNQLKSNMLGYEFIKKHGGEIVRCTMIGDVKLLDAKEYYNFVTEHYTNNRRKKEKLLMEDIPQEFLNRQMNDSRYISKKVMAILSNIVREEDEQEAKSKFVIACSGGITDRLKQDWGLNDVWNSIVYPRFERLNKLTNTENFGRWENKKGKQVFQTSVPLELQKDFSKKRIDHRHHAMDALVIACASNNIINYLNNESAKSQEKREDLRKKLCDKNRIIRKPWETFTQDAHTALENVVVSFKNYIRVINKATNYYEKYDKNGKKEIAEQKGQDMWAIRKPMHKETVFGQVNLRRKITIKLKDALEKIPAICDKELRDYINILVAKQFNKKQILAHFKSINYRLNMKSVDKVDVWQFSNEKEPMVATRKSVDTSFDTKRIATITDTGIQKILLNYLKAKNNDPNIAFTPEGIAEMNKHITEYNNGKQHQPILKVRVSEPKGAKYQVGETGNKRSKFVEAQKGTNLYFAIYEDKEGNRSYNTIPLNEVIERLKQGLSPVPDANEKSIPLKFHLSPNDLVYVPKTDEENEIKMGQIYKFVDSSGTTANFVPHRVSNLIYNVDKKIAENFCNHEIIQNEYGIGSPQSKNQKSITGEMIKAVCWKLEVDRLGNIHKIIK

SEQ ID NO: 135 - protein, 1130 aa, Streptococcus gallolyticus
MTNGKILGLDIGIASVGVGIIEAKTGKVVHANSRLFSAANAENNAERRGFRGSRRLNRRKKHRVKRVRDLFEKYEIVTDFRNLNLNPYELRVKGLTEQLTNEELFAALRTISKRRGISYLDDAEDDSTGSTDYAKSIDENRRLLKTKTPGQIQLERLEKYGQLRGNFTVYDENGEAHRLINVFSTSDYEKEARKILETQADYNKKITAEFIDDYVEILTQKRKYYHGPGNEKSRTDYGRFRTDGTTLENIFGILIGKCSFYPDEYRASKASYTAQEYNFLNDLNNLKVPTETGKLSTEQKEALVEFAKSTATLGPAKLLKEIAKILDCKVDEIKGYREDDKGKPDLHTFEPYRKLKFNLDSVNIDDLSREVLDKLADILTLNTEREGIEDAIRHNLPNQFTEGQISEIIKVRKSQSTAFNKGWHSFSAKLMNELIPELYATSDEQMTILTRLEKFKVNKKSSKNTKTIDEKEVTDEIYNPVVAKSVRQTIKIINAAVKKYGDFDKIVIEMPRDKNADDEKKFIDKRNKENKKEKDDALKRAAYLYNGTDKLPDEVFHGNKQLETKIRLWYQQGERCLYSGKPIPIQELVHNSNNFEIDHILPLSLSFDDSLANKVLVYAWTNQEKGQKTPYQVIDSMDAAWSFREMKDYVLKQKGLGKKKRDYLLTTENIDKIEVKKKFIERNLVDTRYASRVVLNSLQSALRELGKDTKISVIRGQFTSQLRRKWKIDKSRETYHHHAVDALIIAASSQLKLWEKQDNPMFVDYGNNQVVDKQTGEILSVSDDEYKELVFQPPYQGFVNMISSKGFEDEILFSYQVDSKYNRKVSDATIYSTRKAKIGKDKKEETYVLGKIKDIYSQNGFDTFIKKYNKDKTQFLMYQKDPLTWENVIEVILRDYPTTKKSEDGKNDVKCNPFEEYRRENGLVCKYSKKGKGTPIKSLKYYDKKLGNCIDITPEGSKNEVVLQSLNPWRADVYFNPETLKYELLGLKYSDLSFEKGTGKYHISQEKYDVIKEKEGIGKKSEFKFTLYRNDLILIKDTASGEQEIYRFLSRTMPNVKHYAELKPYDKEKFDNVQELVEALGEADKVGRCIKGLNKSNLSIYKVRTDVLGNKYFVKKEGDKPKLDFKNNKK

SEQ ID NO: 136 - protein, 1371 aa, Streptococcus gallolyticus
MTEKNYSIGLDIGTNSVGWAVITDDYKVPAKKMKVLGNTDKKYIKKNLLGALLFDNGETAEATRLKRTARRRYTRRKNRLRYLQEIFAEEMAKVDESFFYRLDESFLTTDDKDFERHPIFGNKADEIKYHQEFPTIYHLRKHLADSHEKADLRLIYLALAHMIKFRGHFLIEGELNAENTDVQKLFEAFVEVYDRTFDDSNLSEITVDASSILTEKFSKSRRLENLIKHYPTEKKNTLFGNLVALALGLQPNFKTSFKLSEDAKLQFSKDTYEEDLEELIGKIGDEYADLFTSAKNLYDAILLSGILTVADNTTKAPLSASMIKRYNEHQVDLKKLKEFIKNNASDKYDEIFNDKDKNGYAGYIENGVKQDEFYKYLKTTLSKIDGSDYFLDKIEREDFLRKQRTFDNGSIPHQIHLQEMHAILRRQGEHYAFLKENQAKIEKILTFRIPYYVGPLARKNSRFAWAEYHSDEKITPWNFDEIIDKEKSAEKFITRMTLNDLYLPEEKVLPKHSLVYETYTVYNELTKVKYVNEQGKSNFFDANMKQEIFEHVFKENRKVTKDKFLNYLNKEFPEYRIQDLIGLDKENKSFNASLGTYHDLKKILDKSFLDDKTNETIIEDIIQTLTLFEDRDMIRQRLQKYSDIFTPQQLKKLERRHYTGWGRLSYKLINGIRNKENGKSILDYLIDDGYANRNFMQLISDDTLPFKQIIKDAQIIGDIDDVTSVVRELPGSPAIKKGILQSVKIVDELVKVMGHNPDNIVIEMARENQTTNRGRNQSQQRLKKLQDSLKELGSNILNEEKPSYIEGKVENNHLQDDRLFLYYIQNGKDMYTGDELDIDHLSDYDIDHIIPQAFIKDDSIDNRVLTSSAKNRGKSDDVPSLDIVHDRKADWIRLYKSGLISKRKFDNLTKAERGGLTENDKAGFIKRQLVETRQITKHVAQILDSRFNTERDENDKVIRNVKVITLKSNLVSQFRKDFKFYKVREINDYHHAHDAYLNAVVGTALLKKYPKLAPEFVYGEYKKYDIRKFITSSGDKATAKYFFYSNLMNFFKRVIRYSNGKVVVRPVIECSKDTGEIAWNKQTDFEKVRRVLSYPQVNIVKKVETQTGGFSKESILPKGNSDKLIPRKTKKFRWDTPKYGGFDSPNIAYSVFVIADVEKGKAKKLKTVKELVGISIMERSSFEENPVVFLEKKGYQNVQEDNLIKLPKYSLFEFEGGRRRLLASASELQKGNEVVLSRHLVELLYHAHRVNSFNNSEHLKYVSEHKKEFGEVLSCVENFAKSYVDVEKNLGKIRAVADKIDTFSIEDISISFVNLLTLTALGAPADFNFLGEKIPRKRYTSTKECLNATLIHQSITGLYETRIDLSKLGEE

SEQ ID NO: 137 - protein, 1168 aa, Azospirillum sp.
MARPAFRAPRREHVNGWTPDPHRISKPFFILVSWHLLSRVVIDSSSGCFPGTSRDHTDKFAEWECAVQPYRLSFDLGTNSIGWGLLNLDRQGKPREIRALGSRIFSDGRDPQDKASLAVARRLARQMRRRRDRYLTRRTRLMGALVRFGLMPADPAARKRLEVAVDPYLARERATRERLEPFEIGRALFHLNQRRGYKPVRTATKPDEEAGKVKEAVERLEAAIAAAGAPTLGAWFAWRKTRGETLRARLAGKGKEAAYPFYPARRMLEAEFDTLWAEQARHHPDLLTAEAREILRHRIFHQRPLKPPPVGRCTLYPDDGRAPRALPSAQRLRLFQELASLRVIHLDLSERPLTPAERDRIVAFVQGRPPKAGRKPGKVQKSVPFEKLRGLLELPPGTGFSLESDKRPELLGDETGARIAPAFGPGWTALPLEEQDALVELLLTEAEPERAIAALTARWALDEATAAKLAGATLPDFHGRYGRRAVAELLPVLERETRGDPDGRVRPIRLDEAVKLLRGGKDHSDFSREGALLDALPYYGAVLERHVAFGTGNPADPEEKRVGRVANPTVHIALNQLRHLVNAILARHGRPEEIVIELARDLKRSAEDRRREDKRQADNQKRNEERKRLILSLGERPTPRNLLKLRLWEEQGPVENRRCPYSGETISMRMLLSEQVDIDHILPFSVSLDDSAANKVVCLREANRIKRNRSPWEAFGHDSERWAGILARAEALPKNKRWRFAPDALEKLEGEGGLRARHLNDTRHLSRLAVEYLRCVCPKVRVSPGRLTALLRRRWGIDAILAEADGPPPEVPAETLDPSPAEKNRADHRHHALDAVVIGCIDRSMVQRVQLAAASAEREAAAREDNIRRVLEGFKEEPWDGFRAELERRARTIVVSHRPEHGIGGALHKETAYGPVDPPEEGFNLVVRKPIDGLSKDEINSVRDPRLRRALIDRLAIRRRDANDPATALAKAAEDLAAQPASRGIRRVRVLKKESNPIRVEHGGNPSGPRSGGPFHKLLLAGEVHHVDVALRADGRRWVGHWVTLFEAHGGRGADGAAAPPRLGDGERFLMRLHKGDCLKLEHKGRVRVMQVVKLEPSSNSVVVVEPHQVKTDRSKHVKISCDQLRARGARRVTVDPLGRVRVHAPGARVGIGGDAGRTAMEPAEDIS

SEQ ID NO: 138 - protein, 1345 aa, Streptococcus mutans
MKKPYSIGLDIGTNSVGWAVVTDDYKVPAKKMKVLGNTDKSHIKKNLLGALLFDSGNTAADRRLKRTARRRYTRRRNRILYLQEIFAEEMSKVDDSFFHRLEDSFLVTEDKRGERHPIFGNLEEEVKYHENFPTIYHLRQYLADNPEKVDLRLVYLALAHIIKFRGHFLIEGKFDTRNNDVQRLFQEFLAVYDNTFENSSLQEQNVQVEEILTDKISKSAKKDRVLKLFPNEKSNGRFAEFLKLIVGNQADFKKHFELEEKAPLQFSKDTYEEELEVLLAQIGDNYAELFLSAKKLYDSILLSGILTVTDVSTKAPLSASMIQRYNEHQMDLAQLKQFIRQKLSDKYNEVFSDVSKDGYAGYIDGKTNQEAFYKYLKGLLNKIEGSGYFLDKIEREDFLRKQRTFDNGSIPHQIHLQEMRAIIRRQAEFYPFLADNQDRIEKILTFRIPYYVGPLARGKSDFAWLSRKSADKITPWNFDEIVDKESSAEAFINRMTNYDLYLPNQKVLPKHSLLYEKFTVYNELTKVKYKTEQGKTAFFDANMKQEIFDGVFKVYRKVTKDKLMDFLEKEFDEFRIVDLTGLDKENKAFNASYGTYHDLRKILDKDFLDNSKNEKILEDIVLTLTLFEDREMIRKRLENYSDLLTKEQVKKLERRHYTGWGRLSAELIHGIRNKESRKTILDYLIDDGNSNRNFMQLINDDALSFKEEIAKAQVIGETDNLNQVVSDIAGSPAIKKGILQSLKIVDELVKIMGHQPENIVVEMARENQFTNQGRRNSQQRLKGLTDSIKEFGSQILKEHPVKHSQLQNDRLFLYYLQNGRDMYTGEELDIDYLSQYDIDHIIPQAFIKDNSIDNRVLTSSKENRGKSDDVPSKNVVRKMKSYWSKLLSAKLITQRKFDNLTKAERGGLTDDDKAGFIKRQLVETRQITKHVARILDERFHTETDENNKKIRQVKIVTLKSNLVSNFRKEFELYKVREINDYHHAHDAYLNAVIGKALLGVYPQLEPEFVYGDYPHFHGHKENKATAKKFFYSNIMNFFKKDDVRTDKNGEIIWKKDEHISNIKKVLSYPQVNIVKKVEEQTGGFSKESILPKGNSDKLIPRKTKKFYWDTKKYGGFDSPIVAYSILVIADIEKGKSKKLKTVKALVGVTIMEKMTFERDPVAFLERKGYRNVQEENIIKLPKYSLFKLENGRKRLLASARELQKGNEIVLPNHLGTLLYHAKNIHKVDEPKHLDYVDKHKDEFKELLDVVSNFSKKYTLAEGNLEKIKELYAQNNGEDLKELASSFINLLTFTAIGAPATFKFFDKNIDRKRYTSTTEILNATLIHQSITGLYETRIDLSKLGGD

SEQ ID NO: 139 - protein, 1024 aa, Helicobacter mustelae
MIRTLGIDIGIASIGWAVIEGEYTDKGLENKEIVASGVRVFTKAENPKNKESLALPRTLARSARRRNARKKGRIQQVKHYLSKALGLDLECFVQGEKLATLFQTSKDFLSPWELRERALYRVLDKEELARVILHIAKRRGYDDITYGVEDNDSGKIKKAIAENSKRIKEEQCKTIGEMMYKLYFQKSLNVRNKKESYNRCVGRSELREELKTIFQIQQELKSPWVNEELIYKLLGNPDAQSKQEREGLIFYQRPLKGFGDKIGKCSHIKKGENSPYRACKHAPSAEEFVALTKSINFLKNLTNRHGLCFSQEDMCVYLGKILQEAQKNEKGLTYSKLKLLLDLPSDFEFLGLDYSGKNPEKAVFLSLPSTFKLNKITQDRKTQDKIANILGANKDWEAILKELESLQLSKEQIQTIKDAKLNFSKHINLSLEALYHLLPLMREGKRYDEGVEILQERGIFSKPQPKNRQLLPPLSELAKEESYFDIPNPVLRRALSEFRKVVNALLEKYGGFHYFHIELTRDVCKAKSARMQLEKINKKNKSENDAASQLLEVLGLPNTYNNRLKCKLWKQQEEYCLYSGEKITIDHLKDQRALQIDHAFPLSRSLDDSQSNKVLCLTSSNQEKSNKTPYEWLGSDEKKWDMYVGRVYSSNFSPSKKRKLTQKNFKERNEEDFLARNLVDTGYIGRVTKEYIKHSLSFLPLPDGKKEHIRIISGSMTSTMRSFWGVQEKNRDHHLHHAQDAIIIACIEPSMIQKYTTYLKDKETHRLKSHQKAQILREGDHKLSLRWPMSNFKDKIQESIQNIIPSHHVSHKVTGELHQETVRTKEFYYQAFGGEEGVKKALKFGKIREINQGIVDNGAMVRVDIFKSKDKGKFYAVPIYTYDFAIGKLPNKAIVQGKKNGIIKDWLEMDENYEFCFSLFKNDCIKIQTKEMQEAVLAIYKSTNSAKATIELEHLSKYALKNEDEEKMFTDTDKEKNKTMTRESCGIQGLKVFQKVKLSVLGEVLEHKPRNRQNIALKTTPKHV

SEQ ID NO: 140 - protein, 765 aa, Butyrivibrio fibrisolvens
MGITIGLDLGVASVGWAVVNDDYEILESCSNIFPSADASKNSERRGFRQGRRLTRRRKNRIHDFQKLWEDKGFVIPSQGTEDVLAIKIKGLSEKLSVDEVYWVLLNSLKHRGISYLDDADSGDNSSDYAKSISRNEEELKEKLPCEIQWERLQKYGAYRGNISIVEDGEPITLRNVFTTSAYKKEVEQFIDTQAKYNAQYSGDFKADYLEIFNRKREYYEGPGNELSRTDYGKYTTEINADGEYITVDNIFDKLVGKCSVNPDERRAAGASYTAQEFNVLNDLNNLTISSESSFIEDGKLTEDAKRKIIETIKNAKTVNVKKIICDVIGDKKCQISGARIDKNEKEIFHSFEAYNKMRRALEEIGFDISSLSRENLDLIGDILTLNTDRESILNAFNRKGIELADEAKDILVKVRKTNGSLFNKWQSFGLSIMNELIPELYAQPKNQMELLTAMGVFKSRGDRFLECKEIPGDLIVDDIYNPVVSKTVRITVRILNALIKKYGYPDRVVIEMPRDKNSDEEQQRLKKEQRDNENEIKDIKARVKTEYGREITEEDFRQHSKLSLKLKLWNEQQGICPYSGKSIKIDDLLDNPNLFEVDHIIPLSISFDDSRNNKVLVYSSENQDKGNRTPLAYLASVNRQWDIHSFMDYVLKTYAGAQKRKKRDNLLNEQDITKVEVLQGFVNRNINDTRYASKVVLNSLQEYFSSKECSTKVKVIRGSFTHQMRVNLKLKKTVMNHMFIMQLMQCLLLFHRWDMTLIMNLQISI

SEQ ID NO: 141 - protein, 1338 aa, Coprococcus catus
MKQEYFLGLDMGTGSLGWAVTDSTYQVMRKHGKALWGTRLFESASTAEERRMFRTARRRLDRRNWRIQVLQEIFSEEISKVDPGFFLRMKESKYYPEDKRDAEGNCPELPYALFVDDNYTDKNYHKDYPTIYHLRKMLMETTEIPDIRLVYLVLHHMMKHRGHFLLSGDISQIKEFKSTFEQLIQNIQDEELEWHISLDDAAIQFVEHVLKDRNLTRSTKKSRLIKQLNAKSACEKAILNLLSGGTVKLSDIFNNKELDESERPKVSFADSGYDDYIGIVEAELAEQYYIIASAKAVYDWSVLVEILGNSVSISEAKIKVYQKHQADLKTLKKIVRQYMTKEDYKRVFVDTEEKLNNYSAYIGMTKKNGKKVDLKSKQCTQADFYDFLKKNVIKVIDHKEITQEIESEIEKENFLPKQVTKDNGVIPYQVHDYELKKILDNLGTRMPFIKENAEKIQQLFEFRIPYYVGPLNRVDDGKDGKFTWSVRKSDARIYPWNFTEVIDVEASAEKFIRRMTNKCTYLVGEDVLPKDSLVYSKFMVLNELNNLRLNGEKISVELKQRIYEELFCKYRKVTRKKLERYLVIEGIAKKGVEITGIDGDFKASLTAYHDFKERLTDVQLSQRAKEAIVLNVVLFGDDKKLLKQRLSKMYPNLTTGQLKGICSLSYQGWGRLSKTFLEEITVPAPGTGEVWNIMTALWQTNDNLMQLLSRNYGFTNEVEEFNTLKKETDLSYKTVDELYVSPAVKRQIWQTLKVVKEIQKVMGNAPKRVFVEMAREKQEGKRSDSRKKQLVELYRACKNEERDWITELNAQSDQQLRSDKLFLYYIQKGRCMYSGETIQLDELWDNTKYDIDHIYPQSKTMDDSLNNRVLVKKNYNAIKSDTYPLSLDIQKKMMSFWKMLQQQGFITKEKYVRLVRSDELSADELAGFIERQIVETRQSTKAVATILKEALPDTEIVYVKAGNVSNFRQTYELLKVREMNDLHHAKDAYLNIVVGNAYFVKFTKNAAWFIRNNPGRSYNLKRMFEFDIERSGEIAWKAGNKGSIVTVKKVMQKNNILVTRKAYEVKGGLFDQQIMKKGKGQVPIKGNDERLADIEKYGGYNKAAGTYFMLVKSLDKKGKEIRTIEFVPLYLKNQIEINHESAIQYLAQERGLNSPEILLSKIKIDTLFKVDGFKMWLSGRTGNQLIFKGANQLILSHQEAAILKGVVKYVNRKNENKDAKLSERDGMTEEKLLQLYDTFLDKLSNTVYSIRLSAQIKTLTEKRAKFIGLSNEDQCIVLNEILHMFQCQSGSANLKLIGGPGSAGILVMNNNITACKQISVINQSPTGIYEKEIDLIKL

SEQ ID NO: 142 - protein, 1035 aa, unidentified
  source 1..1035: note = Candidatus Puniceispirillum
MRRLGLDLGTNSIGWCLLDLGDDGEPVSIFRTGARIFSDGRDPKSLGSLKATRREARLTRRRRDRFIQRQKNLINALVKYGLMPADEIQRQALAYKDPYPIRKKALDEAIDPYEMGRAIFHINQRRGFKSNRKSADNEAGVVKQSIADLEMKLGEAGARTIGEFLADRQATNDTVRARRLSGTNALYEFYPDRYMLEQEFDTLWAKQAAFNPSLYIEAARERLKEIVFFQRKLKPQEVGRCIFLSDEDRISKALPSFQRFRIYQELSNLAWIDHDGVAHRITASLALRDHLFDELEHKKKLTFKAMRAILRKQGVVDYPVGFNLESDNRDHLIGNLTSCIMRDAKKMIGSAWDRLDEEEQDSFILMLQDDQKGDDEVRSILTQQYGLSDDVAEDCLDVRLPDGHGSLSKKAIDRILPVLRDQGLIYYDAVKEAGLGEANLYDPYAALSDKLDYYGKALAGHVMGASGKFEDSDEKRYGTISNPTVHIALNQVRAVVNELIRLHGKPDEVVIEIGRDLPMGADGKRELERFQKEGRAKNERARDELKKLGHIDSRESRQKFQLWEQLAKEPVDRCCPFTGKMMSISDLFSDKVEIEHLLPFSLTLDDSMANKTVCFRQANRDKGNRAPFDAFGNSPAGYDWQEILGRSQNLPYAKRWRFLPDAMKRFEADGGFLERQLNDTRYISRYTTEYISTIIPKNKIWVVTGRLTSLLRGFWGLNSILRGHNTDDGTPAKKSRDDHRHHAIDAIVVGMTSRGLLQKVSKAARRSEDLDLTRLFEGRIDPWDGFRDEVKKHIDAIIVSHRPRKKSQGALHNDTAYGIVEHAENGASTVVHRVPITSLGKQSDIEKVRDPLIKSALLNETAGLSGKSFENAVQKWCADNSIKSLRIVETVSIIPITDKEGVAYKGYKGDGNAYMDIYQDPTSSKWKGEIVSRFDANQKGFIPSWQSQFPTARLIMRLRINDLLKLQDGEIEEIYRVQRLSGSKILMAPHTEANVDARDRDKNDTFKLTSKSPGKLQSASARKVHISPTGLIREG

SEQ ID NO: 143 - protein, 1270 aa, Mycoplasma gallisepticum
MNNSIKSKPEVTIGLDLGVGSVGWAIVDNETNIIHHLGSRLFSQAKTAEDRRSFRGVRRLIRRRKYKLKRFVNLIWKYNSYFGFKNKEDILNNYQEQQKLHNTVLNLKLEALNAKIDPKALSWILHDYLKNRGHFYEDNRDFNVYPTEELANYFDEFGYYKGIIDSKNDDDDKLEEGLTKYKFSNQHWLEEVKKVLSNQTGLPEKFKEEYESLFSYVRNYSEGPGSINSVSPYGIYHLDEKEGKVVQKYNNIWDKTIGKCSIFPDEYRAPKNSPIAMIFNEINELSTIRSYSIYLTGWFINQEFKKAYLNKLLDLLIKTNSEKPIDARQFKKLREETIAESIGKETLKDVESEEKLEKDDHKWKLKGLKLNTNGKIQYNDLSSLAKFVHKLKQHLKLDFLLEDQYTPLDKINFLQSLYVYLGKHLRYSNRVDSANLKEFSDSSRLFERVLQEQKDGLFKLFEQTDKDDEKILTQTHSLSTKAMLLAITRMTNLDNDEDNQKNNDKGWNFEAIKNFDQKFIDITKTNNNLSLKQDKRYLDDQFINDAILSPGVKRILREATKVFNAILKQFSEEYDVTKVVIELARELSEEKELENTKNYKKLIKKNGDKISEGLKALGIAEDKIEEILKSPTKSYKVLLWLQQDHIDPYSQKEIAFDDILTKTEKTEIDHIIPYSISFDDSSSNKLLVLAESNQAKSNQTPYEFINSGKAEITWEVYEAYCHKFKNGDSSLLDSTQRSKKFAKMMKTDTSSKYDIGFLARNLNDTRYATIVFRDALKDYANNHLVEDKPMFKVVCINGGVTSFLRKNFDPKSWYAKKDRDKNIHHAVDASIISIFSNETKTLFNQLTKFADYKLFKNTDGSWKKIDPKTGVVSEVTDENWKQIRVRNQVSEIAKVIDKYIQDSNIERKARYSRKIENKTNISLFNDTVYSAKKVGYEDQIKRKNLKTLDIHESAEENKNSKVKKQFVYRKLVNVSLLNNDKLADLFAEKEDILMYRANPWVINLAEQIFNEYTENKKIKSQNVFEKYMLDLTKEFPEKFSEAFVKSMIRNKTAIIYNVEKDVVHRIKRLKILSSELKENKWSNVIIRSKNESGTKLSYQDTINSIALMIMRSIDPTAKKQYIRVPLNTLNLHLGDQDFDLHNIDAYLKKPKFVKYLKANEIGDEYKPWRVLTSGTLLIHKKDKKLMYISSFQNLNDLIEIKNLIETEYKENVDSDPKKKKKASQILRSLSVILNDYILLDAKYNFDILGLSKNKIDEILNSKLDLDKIAK

SEQ ID NO: 144 - protein, 1204 aa, Prevotella ruminicola
MERILGIDTGTNSLGWAIVDKDENQYHLVAKGTNIFSEGVKIEKGIESSKAAERTEHRSVRKHYWRRKIRKIRLLTILSDNDLCPRLKHEQLRQWRLKKVYPTDDTFMEWQRTEDKAQVNPYKFRYICLTQKLDLSDITQRFILGRALYHLNQRRGFLSNRKEATKESEGTVKEGISSLSKDMKDSGCEYLGEYFYQLYQQGKKIRNHYTARKEHYLKEFKAICSKQELDDALIEKLEKAIFDQRPLKSQKGQVGTCTFEKGKSRCPSSHPLYEDFRMYSFINNIKVQVDTLYDKGERSLTDEEKQLIIPLFKRKSKRTFPFEDIAKKIAGKNNYCYIKSNEEKAYKFNYQMDTQVSGSPVNAQLEEIFGEDWLSSVCEVYTLANNKSRFQIMNDVWHVLFFYDDEDKLKEFAKDRLQLDDELAEKFSKISIPNDYAALSLKAIRKIMPYLRDYGLIYSEAVFLANLVDVLPQHVWGIKEMREAAIENVIDVMHSYDKNNIDGITLEGCVKTFLKERYQVSDDNLKKLYHPSMLDPYPRQRPNDEGVFQLGSPRISSVKNPMAMHSLFRLRKVVNLMLKKGYITPDTKVHIEFSRDLNDANKRWAIQTWQRENEKERERCRKEIEKYIASPSDTDILKYQLWEEQNHKCLYTGDEIRITDFLGDNPKYDIEHTIPRSAGGDSTKMNLTLCSSRFNRDEKKTKLPAELVNHDEILERISNWKEKYEDIDKQIRKISTKGATSKEDKDSKIRRRHYLILQRDYWRGKYQRFTMTEVPEGFSRRQGTDISVISRYARMYLKSVFKQVYIVKGIATSDFRKMWGIQDEYAKKERVNHVHHCIDAITIACIGKAEYDKLADYRHQYDDYLFQGKTKPTFDKPWPSFVIDIKHIQDELLIAHYAKDNLEKFTKKNLRGKDGRIIRDKFGNKLQMKGDTSRNSLHNDKFYGAINHEGEIKYVYRTNIEALDAKSIGNIVDPTVRSIIESAIAIHGSLKAAINKGIWMNEEKHIPIKKVRVFRNDVKKPIELKDQRDLSDKDYKQHYYVTNDGNYMMLIFSKLNNKGREIRQHVVINSLEATEVIKSHKRSQVGKVVWESYYSKEGFDLIYKLKSGTMILLYENNRDEVWDLDIRNLQKRLYIITKMKYDGRIYMMHHQEAREKKDLEEKSGSFKINEDYRPLIVNSYNQFNALVQDLDFEINDLGEIRRLI

SEQ ID NO: 145 - protein, 1178 aa, Scardovia inopinata
MGKRHNSNMAKKKISYRIGIDVGLNSTGLAAIEVDDDGAPIRILNTMSVIHDGGVDPDAAKVRGTRLAISGIARRTRRMRRRRAKRLDRLEQILEKYGYTDTEPVLEEPYGPWICRAELADGFINDDEQRRMMIGIAIRHIARHRGWRNPYQNVRALLNIDDSDLSEEYKNLKEKVQDQINDGKDLPNFTPSQLVRDYLDNFSGQPAARIRTGKAGPRGNRRDAVGILPQRMRQSDYAYELQRIFDMQKIGRDEAQELLMAVFEAKSPKGSAEKRIGKDPLTGKKRALKASLAFQKYRIVATITNLRIKTGTGSERMLSPTELNDIYTYLLRVQDDNHLPTWEDICEEVLHIGRYQLAGIGKTFEGGERISNMPPVIQTSLAIHGLSEGTLAEKLTKWWDKADDDSRESMIKLLSNTVDIDRVNEVDENFASALDFIDSLDDEELTKLDKIALPRGRAAYSEEALNKLTADMLNTGDDLFSARQRIYHVNNSWRPPQPPIGEPLGNPAVDRVLKITNRYLMNCLNRWGQPRRVTIEHTRSGFTSVKQATEHQKISDKRAEYRRDIVKQLEEAGVESVHEYDIRRWEAVQRQNGQCLYCGRDITFKTCEMDHIVPRKGPGSTNTRTNFAAVCPECNRMKSNIPFASWAETKEAKDRGVSLDKAIKQVRFFNFTKNEYSPQAQRNFKKSMIERLKQKTSDEPLDNRSIESVSWMADELYKRIDWYFNHEQYETSKKAINDDKDNLSGTQVVVYPGSITAEARNAAGLGGNIHFIGGRYKTRLDRRHHAVDACVIAMMEPGIARILTERNQLRQAQRLTARIEDDEVNWKDYPTENTAGYNKYQAWSDRMHALLEYMNNALDYDKIPVVRWERLQLGNRSAHEDTIHPLKKLPLSHEISAIDINHASTPALYEALVSLPDFSEQDGLPADPSRQINVNGERYSGDDLVSFFNSNAAQIAIQGGSAELGTAFHHARIYRCWTVGKNGKKKIFFGMIRVYQHDLLHAKNEDLFTYPLKRSSVSMRYAKKEVVHAILSGNAEYVGYLCVGDELVLDLKGDKSNDEGGSRLSGQVGEFVQKFEEDSKVNSQIVNRWTVDGFPDEAKLRLRPSMFAGEGLKNMKSELVENAAIKNILSKTGWRVSVDVISKKSPVVLRRNAFGEPRWKTNAGLPVSYRWQDTETKE

SEQ ID NO: 146 - protein, 1371 aa, Gordonibacter pamelaeae
MNLRNVESYQVGLDIGTGSVGWAVLDDNGDLCRFKGKPTWGSRVFPTAETAAEARVHRGQRRRYDRRRQRIDLLQRFFADEVAKVDPEFFIRLNQARLHPENRDPAHADYRWPLFNGSNFTEKDYYRQFPTIYHLRAHLLKSDEPADIRLVYLALHNIVKHRGNFLHQDNPSLSARNANVGDAVEALCLALDEWCGAHDVECACDEAALAEALGDASLRPGEKRERAEAALGVEKAHKKLAKAVSSAVVGYAAEFGHVFFAESEGSKFALSNDEKVEAYVCPDEGRDLFDAMRAVHSSYVLMGILSEAQGELLSVCKVGEYERYKRDLETLKSLVRAYGPERYDEFFCGPFYEGTRDYDPGKAQGYTKYNLGASKLSHEDFLKEVQKLLKDIGAQADERYADIERAIEAGAFLRRLKTSDNGTIPYQLHLEEMDAIIERQAAFYPFLAQEKDKLKSLVSFRIPYYVGPLTQKNAARDGKGEARFAWSSRKPGMEDARVYPWNWEDVIDKDQSAEDFIRRMTGTCTYLKGEPVLARCSLDYELFCVLNELAGARWTQDGDKSYRFDAADRLGIVEDLFKKRKRVTYEAAEKWLARTHGPESGKSAGGAYHVSGGQGEDAFESQLSSHYDFCKILGVDELSDADEAMAEDIILWNTVFEDRSILKRKIKLAYGDRLGDAQVRKLCQKRYTGWGRLSGELLRGLRSATDNGPKTIMDILLEGDPNHARRMGAAMNLMEILHDDLLEFQAKIDEHNRERALAVGGMSVDEVTGSPALRRGINQALRVVDEIAGIAGKPPAHIYVEVTRDEGARNKGRRTTSRYRALEAALSSIKAQCADVYAELKERDPRALDDERLTLYFMQCGKCMYSGDALDINKLQTYQVDHILPQSYVKDDSFENKVLVRPDTNQRKGDTLLLDERLIARMRGFWRTLRDAELIGEKKFNNLTRTSVSDEQMKKFVSRQLVETGQMVKQVQQLLQARYPESEVQPVKAGVSHQLRVGCALAKSREINDFHHAHDAYLACQVGRFVQYRHSAVYSEPVKMAAVVKQFIKKQAEDYRRTRELPGSDGFIVSSFMTPGFDVKTGEVFRDAWDAGAEIDRIRRCFDYKDCFISRMPEETHGAFWDATIYSPRAAGKTLSLPLKRGLDPRKYGSYSREQFAYFFVYEAVKPKKKQRVLEFAPVPVRVASALANDPDALEDYARELAEAEGLVFERIRRRKVYKYQQIIVGDSRLYVTGREEVRNARQLAFSQDETKLICRIEQGEECEEGELLDLFRSMQRKYLACAPRLARLMKVAEMEEGFIAATASGKREVLLSLTSIAAAHRNSIDLKPIGRKGSSGQMKITFSKELSTNGILFVDSSVTGMFERRCRLGL

SEQ ID NO: 147 - protein, 1388 aa, Zunongwangia profunda
MKRILGLDLGTNSIGWALVNEAENEKEISKIIKLGVRVNPLTIDEKTNFEKGRPLSTNADRTLKRGARRNLQRYKLRRENLIEILIDNHIITKETPLTEIGKGTTYQTLSLRAKAVRERIDLEDFAKVLLAINKKRGYKSSRKASNDEEGQAIDGMAIAKELYERGITPGQYVLELLENDRKYIPDFYRSDLKQEFNKIWNNQKTFYPEILTDELFKELDGKNKSQTWAICQKPFNIKGIKRITKGREKTIENYHWRVKGLSGKLNLEKLAIILQEINNDINQSSGYLGGISDKSKKLYLNKETVGEFLYKQIAKNPHTSLKNQVFYRHDYLDEFEQIWKTQSNFNANLTDELKQEIRDVIIFYQRKIKSQKSLISFCQFESWEQEYFDKETGKTKTRTVGRRVIPKSSPLFQEFKIWQNLNHLVFTNSETDEKIEIKEVEQEIRKELFEELNLRGDLNPNDLLKILRSQFKIGKLSNWKCNFEKIEGNRTNAALFNIYQKISDFEGYGIDWNKSNAKKIRKELKATFPEIGIDASILEFDAYKKQLTNQSSYELWHLLYSAEEDFKISEQDKLIYGNSSVSLKKKLHLKFGFNPEYAKMLANLSLMSDYGNLSAKAIKKILPYLEDGHLYSEACRLAGYNHSKSLTAEELEKFEPKAKLDLLKKNSLRNPVVEKILNQMVNVVNQVIDTYGKPDGVRIELARELKKSAKERAEMTKGIADGTRRNEEIKKIITQKFGIPNPTKSDLVRYRLWQELESRGYKDIFTDKYISPDKIFSSEIDIEHIIPKALLFDDSFSNKTLSFRNVNLKKANRTALDFITQDYQSNVEAYKERVETWNKDNHISKGKRNKLLMSLKDIPDGFIERDLRNSQYIARKAKRMLYEVFPNEVLATSGSITDKLRSDWDLINVMKELNLPKYKALGLTEYEERLDKGTEELFKHEVIKDWTKRNDHRHHAMDALAVAFTTHNHIQYINNLNARKDITQDNHPIIKNIENLITEVNSKGKRVFKAPMSSFRESAKEQIEAILVSFKNKNKVVTKNINQTKKEGGFNYQNAKTPRGQLHKETIYGKSKQPLEKPVKINNRFCKKQVGLIINFKEQEAVLHHLKKYDNNEKIAFSNKTLKSDPIQVNGSPLREVKIFEEIFTIRKDINPDNFKTQKHLDKIIDKGIKEVMKKRLEEYNGDFKTAFSDLDKNPIWLNQSKGITIKRATISGVTNAEPLHQAKDHLGNIILDDNGKEIPIDYVSTGNNHHVAIYQDESGNLQEEVVSFYEAVIRKNQDQPIIKKRHPKGWKFLFTMKQNEMFVFSSENFNPSEIDLLDEKNAAIISPNLFRVQKIATKNYMFRHHLETEVTNNLDFTYRHFQATEWLRNLCKVRIDHIGRIVQIGEY

SEQ ID NO: 148 - protein, 1082 aa, Methylosinus trichosporium
MRVLGLDAGIASLGWALIEIEESNRGELSQGTIIGAGTWMFDAPEEKTQAGAKLKSEQRRTFRGQRRVVRRRRQRMNEVRRILHSHGLLPSSDRDALKQPGLDPWRIRAEALDRLLGPVELAVALGHIARHRGFKSNSKGAKTNDPADDTSKMKRAVNETREKLARFGSAAKMLVEDESFVLRQTPTKNGASEIVRRFRNREGDYSRSLLRDDLAAEMRALFTAQARFQSAIATADLQTAFTKAAFFQRPLQDSEKLVGPCPFEVDEKRAPKRGYSFELFRFLSRLNHVTLRDGKQERTLTRDELALAAADFGAAAKVSFTALRKKLKLPETTVFVGVKADEESKLDVVARSGKAAEGTARLRSVIVDALGELAWGALLCSPEKLDKIAEVISFRSDIGRISEGLAQAGCNAPLVDALTAAASDGRFDPFTGAGHISSKAARNILSGLRQGMTYDKACCAADYDHTASRERGAFDVGGHGREALKRILQEERISRELVGSPTARKALIESIKQVKAIVERYGVPDRIHVELARDVGKSIEEREEITRGIEKRNRQKDKLRGLFEKEVGRPPQDGARGKEELLRFELWSEQMGRCLYTDDYISPSQLVATDDAVQVDHILPWSRFADDSYANKTLCMAKANQDKKGRTPYEWFKAEKTDTEWDAFIVRVEALADMKGFKKRNYKLRNAEEAAAKFRNRNLNDTRWACRLLAEALKQLYPKGEKDKDGKERRRVFSRPGALTDRLRRAWGLQWMKKSTKGDRIPDDRHHALDAIVIAATTESLLQRATREVQEIEDKGLHYDLVKNVTPPWPGFREQAVEAVEKVFVARAERRRARGKAHDATIRHIAVREGEQRVYERRKVAELKLADLDRVKDAERNARLIEKLRNWIEAGSPKDDPPLSPKGDPIFKVRLVTKSKVNIALDTGNPKRPGTVDRGEMARVDVFRKASKKGKYEYYLVPIYPHDIATMKTPPIRAVQAYKPEDEWPEMDSSYEFCWSLVPMTYLQVISSKGEIFEGYYRGMNRSVGAIQLSAHSNSSDVVQGIGARTLTEFKKFNVDRFGRKHEVERELRTWRGETWRGKAYI

SEQ ID NO: 149 - protein, 1186 aa, Gardnerella vaginalis
MEGNISYAIGIDVGLNSVGLAAIRLDNNGEPIRILKAMSVIHDAGIDPNGAKESDTRKAISGVARRVRRLYRQRRRRLQKLDFLLHSLGFPVVENKDLDFSDSFTPWIFRAKLADEYIADEKQRKQMLSVAIRHIARHRGWRNPYQSIKSMTQETEYSEFYNELLKNIEKFAPGVSCEGSTPAQLVRDYLLSQQGKASRRLRITTDDRRKNHPNSLDPVLPRKLMQSDNMLEILNIFNVQHIDNKYVREQIINAVFYAKSPRGSAENRVGKDAITGKGKRALKASLAFQKYRIISTISNLRIRENSKERCLTIEEKQSVYKLLTTSTDEYSKEKSAEAPLYTWIDVADCLGIERYKLRGVGSQIEDGESVGNRPPMLNSELAILYANAKSLKQSLITWWLAANRTQEDKEAFIEILSNTVDIEAIHDNPEYQDKYGSVIAFIDSMDETEIAALENISLPNGRAAYSLETLDKLNKQMLETDDDLFEARKKLFNLPNNWRPSEAPIAEPTGNPSVDRVLKIVHRFLISAKNRWGNPERINIEHVRSGFQSKKMANSYKKLLDKRTEGKENLKAMMRNSLHLGTSDSISDADIRRYEAVQRQNGQCLYCGSEITYHTCELDHIVPRKGPGSTNTRENLVATCSSCNAQKCNTPFATWCEESTYCKNHDISVDSAINRVRAFIFPPNSYDKRGASQFKKEVIARLKQKVGDEAFDNRSIESVAWMANELHRRIDWYYNSQNYQTNNGISDITNKAQTNVGVYAGSLTAIARRMSGIDGKLEFFDGRRKTRFDRRHHAVDASVIAMMTPGIAQILAIKCNLRETQLLQGNKVVPGGIDWKEYPTANDQGYQQYANWSVRMNALLELLNEEMRADRIAVVNSIRLRYSNSSVHKDDVHALLKLHVGDEIDSETIRRASTPALYCALTRNPDYDVNNGLPENTDRTILLHDKKLNADDSITFFKSKAAQLFVREGSVEIGNSIHHLRIYEYFEKLKSGKVKKSYGMIRVFQDDLHRYIHEDLFSCDLPEQSISMRYADTKVAHAVQTGNANYLGYLVPGDEIIVDFSHVKLSGYIGEFVEFLNKIGANCAAYKHWVVAGTDDKTTLILKPSMISSEGIDKLYSNCERNNFDYASYEKSIDKILVDKGWRVSVNVLDQYKAATIRRNALGEPRWASRSHLPISWSWDTGENRE

SEQ ID NO: 150 - protein, 1434 aa, Bacteroidetes oral
MKNILGLDLGTNSIGWAYVKQAQNDSEKSEIAELGVRVNPLTVDEKTNFEKGKPISTNADRTLKRGARRNLQRYKLRRQELIELLKDYQVISDKTILAEDGKETTFETLRLRVKSAKEQVSLEELARILLMINKKRGYKSSRKAKNEDEGQLIDGMEIARRLYDENLTTGQLSLQLLKEGKKSLPDYYRSDLQHELDKVWNFQKQFHPDILTDEFYTSIQGKGQKATRESFSSKYGIDTAENKGSREEKKLQAYQWRADATHKELTKEELAFVITEINNNINNSSGYLGAISDRSKELIFANETVGEYLWKQIQNDPHTSLKNQVFYRQDYFDEFERIWETQSGFYPQILTESLKNELRDILIFYQRKLKSQKALVSICEFESKEIPLKDKQGNPISKNGIPVTKLVGPKVAPKSSPLFQEFKIWQNLNNVLVRPKGSRKRKVTTNQQSTLLEGQEPVFELNLEQKELLFEELNLKGNLKTDYCLELIGYSAKEWEMNYPTLEGNKTNKALYEAYLKIIDSEGYDAKKLLKVKTDKDDINLDDIKVSASEIKTMISDIFNELGINTKILDFDAELERKQFEAQASYRLWHLLYSYEGDDSKSGNELLYRLLEDKFGFKREHSKTLANVSLLSDYGNLSTKAIRTIYPYIKENKFSTACELAGYRHSKLSISKEENENRTLKDTLDVLKKNSLRQPVVEKILNQMINLINELIEKHSEKDEKGNIVKYFKFDEIHIELARELKKNAEERRELDSKVREGKDRNEKIITILKSEFGLPYPTKNDITRYRLYEELKDNGYKDLYTNTYIPREKLFSKEIDIEHIIPKSRLFNDSFSNKTICYRQDNLNKGERTAYDYIEGLGKTQLDEYLNRVENLYTNKFITKAKYRNLLKKESEIGDGFIERDLRETQYIAKKAKEMLLQITRHVVSTTGSITDRLRDDWELVNVMRELNLPKYKVLGLTEIQERKNGQTVEVITDWTKRNDHRHHAMDALTVAFTKHSHIQYLNFLNARKDEKHKEYSNIMGIQQLETEKTTDKDGKDRRVFKTPIPNFRQVAKEHLESILISHKTKNKVVTRATNKIAGSKKQQETLSPRGQLHKETVYGKYRRYVQKEEKIGSKFDLQTIERVANPLYKRLLTKRLEENGGDPKKAFTGKNALAKSPIYLDETQTQQLPEKVKLVWLETDFSIRKDITPDNFKDEKSIDKVLDEGIKRILKDRLKSFDGDAKRAFTDLEQNPIWLNKEKGIAIKRVTISGVSNAEPLHTKKDHLGNEIFDDTGKPIPVDYVSTGNNHHIAIYRDENGNLQEKAVSFFEAVTRANQGLPTVDKTYNQHLGWQFLFTMKQNEMFVFPNKETGFDPQEIDLLDPKNKKLISPNLFRVQKISTKNYFFRHHLETSVETHNALNGVTYKSQLGLNGITDIIKVRINHLGDIVHIGEY

SEQ ID NO: 151 - protein, 1341 aa, Peptoniphilus sp.
MWGSRLFEEASTAQDRREHRSNRRRLERRKYRLDLLEELFVEEINKIDPEFFIRLRESKFHFEDRSLKNTFILFNDKMEGGYNDKVFFSKYPTIYHLRSALINGNKEDVRAVFLAIHNILKNRGHFLLAGNDINISLSLNDTLTDLFEYLKIHLGIEVEFENKLKDIEKIALDKNLSKSDKQKKIVQLLETDYKKQLADVFKLSLGLTANMENIFGKENEQGLEFINAENKIKKIQFDSSYEENIAEFDQFYGEYFEIIDICKKIYDAISLSQILVDGKGLSESKVLSYEKHKEDLKLLKKVLKNIDKAYDNKGEDRLVYKVLKEDKDKGTNYVNYSKLSNNGTATTKEEFYKFLSKNLDLKKFGKLNKEDIETLDYINSEILLGRFLPLQKEKINGVIPYQLQMKELTQILNNASKYLPFLNKIEDGMTVKDKIISLIKFRIPYYVGPLNEYNRIENGNGFAWIEKKKNEKIFPWNFNDVVDIEKSAEKFINNLTNKCTYIKEETVLPKNSIIYSKFMVLNELNNLQYGNKKLDIELKMKMYTDLFLEKKDNRKVTEKRILEYFRINGINDGKEKLTGLNNEIHADMKSYRDMCEIMGENFNINVAENIINWITVFHGEKKILINKIKNVYGKMFNDEQISKLSKLNYSDWGRLSKKLLTDIKCYIDADGINFPVSILEAMEVSNKNLMELLSNKYEFISCIDDINNKYFGDRDISASELIDELYVSPAVKRGIWQSVRILEEIVSIIGHNPKKIFIEMTRHNEEKVQKSSRRHNLEELYKAIRKDPEYVELIKEFDSTTDTDSFKIKKLYLYFMQLGKCAYSKEKIDFDKLFTDSYDIDHIYPRSKTKDDSIHNNLVLVKAKYNREKTDVYPIDINIQKNMNSFWNFLYTKKFITEEKYKRLIRTSDLTDEELAKFISRQLVETSQSTKATAEVLKQIYGDSDICYVKAENVSDFRYGSSRQKDKNDIQKLFVKCREVNHFHHAKDAYLNIVVGNVYDVKFTKNPVNFIKKNKMGNKSNYSLNHMFCFDVERNGYKAWDSSETIKTVGRMMKSNDVRITKHVHPTRGELYDATIYKAKIAKTGSYMPLKSSKNTPLSDVTKYGGYTKIKIAYYSVYKYKFSDKNLIKTEIRLIPIPIYLSKNDDDIKEYVKNYLNDRVNSKLIDFTKIYDKLYVNSLIKINGYLYYLGGKTNDRVWIDNAVSIVLDDKIEYLIKRISNDIKYGYEINVSDDELMDIYESLAEKANKKIFYNRLSDFEKIFSNMDVKKKFVKLEKNDKCRVLLQLLNVLTDSQTTYKLEMVGLKHSRSNIGMKISNLEEFKVINSSITGLYSNEIDILNI

SEQ ID NO: 152 - protein, 1391 aa, Lactobacillus gasseri
MTKIKNEYIVGLDVGTNSCGWVAMDFQNTILRMHGKTAIGSHLFDAGNSAADRRAFRTTRRRIKRRKWRLKLLEEIFDPYMTEVDPYFFARLKESGLSPLDKRKNVSSIVFPTALEDKKFYCNYPTIYHLRYDLMSEDKKFDLREIYLAIHHIVKYRGNFLYNTPVKDFEASKIDVKDSLEKLNELYERLDSEFTVELDSSNALEIEKIIRDKKVFKINKVKSIHQLLSLKTENKERTKLIKDVSKQIINAILGYKTKFETILLKNISKDEADDWEFKLTDVDADNKFENLIGDLNENEQEILLEIRNLANAITLSNIVEEGKTLSESMIDKYNKHSDDLELLKQVISDHPDRDKAKKLALAYDLYVNNRHGKLLQAKDVLGSKKTLSKEDFYKEVKKNLDDSKASQEILDTIALDSFMPKQRTNENGVIPYQLHQLELDRIIKNQGKYYPFLKEVNPVSSHLKEAPYKLDELIRFRVPYYVGPLISPNESTKNKQTKKNQNFAWMIRKEQGQITPWNFDQKVDRMASANKFIKRMTTKDTYLLGEDVLPANSLLYQKFTVLNELNNIKINGKRISVPLKEELYNNLFKKNSTVTTNKLKSYLKENYNLINVEIKGLADEKKFNSGLTTYNKLRNLKIFDQQLDDLNYDKDFERIIEWSTIFEDKAIYKDKLKTIKWLSDRQIDKLSKIRMQGWGQLSKKLLSQLTDNNGQTIIEQLWDSQNNFMQIVNQSDFKDAIAVANQNLLVNTSVEDILNEAYTSPANKKAIRQVVKVVDDIVKAASGKVPKQIAIEFTRDADDKAKISQTRANKLRKVYKELSNELASETIRNELERVAKDQKLLKDKYYLYFMQLGRDAYTGEPINIDDLGQYDIDHILPQSFIKDDSLENRVLVKKAVNNGKSDNVPVKLYGNRMAADLGMTIRHMWEKWKDQGLITKTKYNNLIIDPDKINKYESSGFIHRQLVETSQIIKLVSTILQSKYPDTEIIVVKARYNHYLRKHLNLYKSREVNDYHHAIDAYLSAICGNLLYQVYPYLRPFFVYGQYKKFSSDPKKEKIIYDKTRKYNFISQIFENKSNDIISLETKKKVFDKKDIIEKLKHAYNYKYMLVSRETETHDQEMFKMTVYPRLSRDTKKSRNLISKKKDMPTEIYGGYTNNSDAYMVIARINKKKGTEYRVFGVPMRELVNLRKAEKNGRYNAYLKQVLEPEIMYSKNGKKNKTISSFEIVKAKVPYKQVILDGDKKFMLASSTYVQNAKQLTLSQNSMQAITDNCENDTEEEKALEEKALIEAYDEILTNIDKYLPLFDINKFREKLHAGREKFINLSLDVKKDTILQVLNGLHDNAVMPKIKSLGLSTPLGFMQFSSGVPLSENAKLIYQSPTGLFEKRVKISDL

SEQ ID NO: 153 - protein, 1426 aa, Sphingobacterium spiritivorum
MKHILGLDLGTNSIGWALIKQDFENKQGEILGMGSRIIPMSQDILGDFGKGNSVSQTAERTKYRSVRRLRERFLLRRERLHRILNVLGFLPEHYASQIDFTKRFGKFKEETEPKLVYSNEGFIFKKSFEEMLSDFKTHQPQLLEDNKKIPYDWTIYYLRKKALSRKIEKEELAWILLNFNQKRGYYQLRGEEEEENPNKLIEFYSLKIVDVLADEPQKGKSDIWYSLILENGWIYRRSSKTPLFDWKEKTRDFIVTIDLNDDGSVKTDKEGNEKRSFRAPGENDWTLVKKKTEQEIDSSRKTVGTYIYETLLKNPKQKIKGKLVRTIERKFYKTELKQILEKQKEFHPELRQDDLYSDCVRELYKNNEAHQLTLSKKDFVHLFMEDIIFYQRPLGSQKSSISNCTLEFRKYKDENGTEHTQYLKAIPKSNPYYQEFRIWQWMYNLNIYKKEDDTNVTKDFLNTKADFESLFEFLNNRKEVDQKALLKHFKLNDKTHRWNYVEDKKYPCNETKTMILSRLDKVENISDDFLTREMEQKIWHIIYSVNDKVEYEKALKSFAGKNNLEDNSFFEAFKKFPPFKSEYGAFSEKAIKKLLPLMRMGKFWNYNNISEQSKSRIQKIITGEYDENIKDKVREKAIHLTTETDFQGLQLWLVQYIVYGRHSEAAMLGKWNSADDLEEFLKEFKQHSLRNPIVEQVITETLRVVKDIWQKYGNGAKDFFREIHIELGREMKLPAEERERLTRQISENENTNFRIKALLAEMMDDNSVENVRPFSPMQQEILKIYEEGVLNSDIEIEDDILKISKTAQPSSSDLKRYKLWLEQKYKSPYTGQIIPLNKLFTPEYEIEHIIPQSRYFDDSFTNKIICESAVNKLKDNYIGLEFIKKLGGSIVECGNGKSVAILKHDAYEDFIKKHYANNRSKRNKLLLEDIPEKMIERQMNDTRYISKYISGVLSNIVRVEDGTDEGVNSKNIVPGNGKITTQLKQDWGLNDVWNDLILPRFERMNHLTNSTDFTAWNENHQKFLPTVPVEFSKGFSKKRIDHRHHALDALVIACATKDHVNLLNNQSAKSDTKRYDLKKKLMKFEKVAYNHPQTGERIEREAPKQFLKPWETFTIDAKNHLETIIVSFKQNLRVINKATNYYEKYVEKEGTKVKERVEQKGTNWAIRKPMHKETVSGKIDLPRIKVPKGKILTATRKSLDTSFNLKTIGSITDTGIQKILKNYLQYKDNNPELAFSPEGIEDMNKNIEKFNNGKAHQSISKVRVFELGSKFPLGQSGNKKEKYVEAAKGTNLFFAIYQDKNGKRSYETIPLNEVIERQKQGLSVVDLKGVDDFYLSPNDLVYVPSEDELENISMIDFNKMSSERIYKVVSFTGNQIFFVRQDIATSVVNKAEFSTLNKMERAIDGTMIKETCVKLQIDRLGNISKI

SEQ ID NO: 154 - protein, 1361 aa, Lactobacillus casei; identical to SEQ ID NO: 70

SEQ ID NO: 155 - protein, 1436 aa, Bacteroides fragilis
MKRILGLDLGTNSIGWALVNEAENKDERSSIVKLGVRVNPLTVDELTNFEKGKSITTNADRTLKRGMRRNLQRYKLRRETLTEVLKEHKLITEDTILSENGNRTTFETYRLRAKAVTEEISLEEFARVLLMINKKRGYKSSRKAKGVEEGTLIDGMDIARELYNNNLTPGELCLQLLDAGKKFLPDFYRSDLQNELDRIWEKQKEYYPEILTDVLKEELRGKKRDAVWAICAKYFVWKENYTEWNKEKGKTEQQEREHKLEGIYSKRKRDEAKRENLQWRVNGLKEKLSLEQLVIVFQEMNTQINNSSGYLGAISDRSKELYFNKQTVGQYQMEMLDKNPNASLRNMVFYRQDYLDEFNMLWEKQAVYHKELTEELKKEIRDIIIFYQRRLKSQKGLIGFCEFESRQIEVDIDGKKKIKTVGNRVISRSSPLFQEFKIWQILNNIEVTVVGKKRKRRKLKENYSALFEELNDAEQLELNGSRRLCQEEKELLAQELFIRDKMTKSEVLKLLFDNPQELDLNFKTIDGNKTGYALFQAYSKMIEMSGHEPVDFKKPVEKVVEYIKAVFDLLNWNTDILGFNSNEELDNQSYYKLWHLLYSFEGDNTPTGNGRLIQKMTELYGFEKEYATILANVSFQDDYGSLSAKAIHKILPHLKEGNRYDVACVYAGYRHSESSLTREEIANKVLKDRLMLLPKNSLHNPVVEKILNQMVNVINVIIDIYGKPDEIRVELARELKKNAKEREELTKSIAQTTKAHEEYKTLLQTEFGLTNVSRTDILRYKLYKELESCGYKTLYSNTYISREKLFSKEFDIEHIIPQARLFDDSFSNKTLEARSVNIEKGNKTAYDFVKEKFGESGADNSLEHYLNNIEDLFKSGKISKTKYNKLKMAEQDIPDGFIERDLRNTQYIAKKALSMLNEISHRVVATSGSVTDKLREDWQLIDVMKELNWEKYKALGLVEYFEDRDGRQIGRIKDWTKRNDHRHHAMDALTVAFTKDVFIQYFNNKNASLDPNANEHAIKNKYFQNGRAIAPMPLREFRAEAKKHLENTLISIKAKNKVITGNINKTRKKGGVNKNMQQTPRGQLHLETIYGSGKQYLTKEEKVNASFDMRKIGTVSKLAYRDALLKRLYENDNDPKKAFAGKNSLDKQPIWLDKEQMRKVPEKVKIVTLEAIYTIRKEISPDLKVDKVIDVGVRKILIDRLNEYGNDAKKAFSNLDENPIWLNKEKGISIKRVTISGISNAQSLHVKKDKDGKPILDENGRNIPVDFVNTGNNHHVAVYYRPVIDKRGQLVVDEAGNPKYELEEVVVSFFEAVTRANLGQPIIDKDYKTTEGWQFLFSMKQNEYFVFPNEKTGFNPKEIDLLDVENYGLISPNLFRVQKFSLKNYVFRHHLETTIKDTSSILRGITWIDFRSSKGLDTIVKVRVNHIGQIVSVGEY

SEQ ID NO: 156 - protein, 1517 aa, Bacteroides sp.
MKKIVGLDLGTNSIGWALINAYINKEHLYGIEACGSRIIPMDAAILGNFDKGNSISQTADRTSYRGIRRLRERHLLRRERLHRILDLLGFLPKHYSDSLNRYGKFLNDIECKLPWVKDETGSYKFIFQESFKEMLANFTEHHPILIANNKKVPYDWTIYYLRKKALTQKISKEELAWILLNFNQKRGYYQLRGEEEETPNKLVEYYSLKVEKVEDSGERKGKDTWYNVHLENGMIYRRTSNIPLDWEGKTKEFIVTTDLEADGSPKKDKEGNIKRSFRAPKDDDWTLIKKKTEADIDKIKMTVGAYIYDTLLQKPDQKIRGKLVRTIERKYYKNELYQILKTQSEFHEELRDKQLYIACLNELYPNNEPRRNSISTRDFCHLFIEDIIFYQRPLKSKKSLIDNCPYEENRYIDKESGEIKHASIKCIAKSHPLYQEFRLWQFIVNLRIYRKETDVDVTQELLPTEADYVTLFEWLNEKKEIDQKAFFKYPPFGFKKTTSNYRWNYVEDKPYPCNETHAQIIARLGKAHIPKAFLSKEKEETLWHILYSIEDKQEIEKALHSFANKNNLSEEFIEQFKNFPPFKKEYGSYSAKAIKKLLPLMRMGKYWSIENIDNGTRIRINKIIDGEYDENIRERVRQKAINLTDITHFRALPLWLACYLVYDRHSEVKDIVKWKTPKDIDLYLKSFKQHSLRNPIVEQVITETLRTVRDIWQQVGHIDEIHIELGREMKNPADKRARMSQQMIKNENTNLRIKALLTEFLNPEFGIENVRPYSPSQQDLLRIYEEGVLNSILELPEDIGIILGKFNQTDTLKRPTRSEILRYKLWLEQKYRSPYTGEMIPLSKLFTPAYEIEHIIPQSRYFDDSLSNKVICESEINKLKDRSLGYEFIKNHHGEKVELAFDKPVEVLSVEAYEKLVHESYSHNRSKMKKLLMEDIPDQFIERQLNDSRYISKVVKSLLSNIVREENEQEAISKNVIPCTGGITDRLKKDWGINDVWNKIVLPRFIRLNELTESTRFTSINTNNTMIPSMPLELQKGFNKKRIDHRHHAMDAIIIACANRNIVNYLNNVSASKNTKITRRDLQTLLCHKDKTDNNGNYKWVIDKPWETFTQDTLTALQKITVSFKQNLRVINKTTNHYQHYENGKKIVSNQSKGDSWAIRKSMHKETVHGEVNLRMIKTVSFNEALKKPQAIVEMDLKKKILAMLELGYDTKRIKNYFEENKDTWQDINPSKIKVYYFTKETKDRYFAVRKPIDTSFDKKKIKESITDTGIQQIMLRHLETKDNDPTLAFSPDGIDEMNRNILILNKGKKHQPIYKVRVYEKAEKFTVGQKGNKRTKFVEAAKGTNLFFAIYETEEIDKDTKKVIRKRSYSTIPLNVVIERQKQGLSSAPEDENGNLPKYILSPNDLVYVPTQEEINKGEVVMPIDRDRIYKMVDSSGITANFIPASTANLIFALPKATAEIYCNGENCIQNEYGIGSPQSKNQKAITGEMVKEICFPIKVDRLGNIIQVGSCILTN

SEQ ID NO: 157 - protein, 1399 aa, Olsenella uli
MNLRNTTDEYNIGLDMGTNSVGWAVTDKAGAIAHFKGKPTLGSRLFDAAQTAAGARIHRSQRRRYVRRRWRLDLLQSLFQDEVSKVDSEFFCRLRQSRLYVGDREKGHADYTWPIFNDSDFNEVDYYKRFPTIYHLRKWLMETDEKADIRLIYLATHNIVKHRGNFLRENNKSLSSRDANPAQAVKSLRLALNDWCSERDYECAWKGEEDDGAIDEAILNVLADGEKGRSDQAKEIAKLTGVDCGDAKQSKQCNEAIAKAIVGLKVEMKNIFGEFPAEKTSYIYLSSDEDVEAVRESCPDDSGELFQALCKLYSAYILQELLSYADPSGQTISANMVAKYKQYGRDLRLLKELTRTYAPQKYDLFFRGETYAGSSDYVVDEARGYTRYNLGTTKANYDDFQKSVKELFKGTDALQDERYQEMMVAFGEQKFLRRLKTSDNGSIYYQLHLEELHTILENQGKHYPFLLSEEDKIESLVSFRIPYYVGPLTRKNAAIGHDGKERFAWSSRKDGMEHAVITPWNWEEIIDRDKSAEDFIMRMTGDCTYLQGEPVLPKCSLLYEEFCALNEFNGAHWTVDGDDERRFDAAQRERIMCDLFRRTRSVTYNKVSDWLERKYNFTGARVRGGQGEHGFESKLGSYIFFCKDVFKTDGLDEADYTMIEQIILWSTLFEDRDILKRKIEEAYGGDRLTSEQIKVICKKRFTGWGRLSKRLLTDIKVNTDTGRKSIMDVLREGNPNNGQRSRTMVFMEVLRDEDLGFQKAIDGLNRDYFREHNNGLMDVNDLPGSPAIRRSINQAVRIVDEIASIARKEPTNIFIEVTREEDDPRKKGKRTKRRYDAIKSALEKFKKDDPSLWKELCEKAPGDMDERLSLYFMQRGKCMYSGRPIKIEELHTGKYEVDHIIPRSYIKDDSFENKVLVYREENQHKTDALLIDSSIRQKMGGYWRMLHDAKLVGDKKFRNLFRNHIDDKAMKGFVARQIVETSQMVKLVQTLFEARYPNTRIVPVKAGISHDLREAAGLVKCREANDFHHAHDAFLACRIGLFIQKRHPSVYDNPIGLARIMRDYARMQAREYKKSHCLAHTQGFIVNSFLSSGFDEETGEIFKDDWDAKAEVEGIRRVLNCRQCFISRMPVEGDTRYGGRYWGETIYSPKGKHKHEIPLKQGLDPNLYGGYSDLLYSYFLIYEASDVSSGERVLRFIGIPTSIAARMANQKRLEEYVSRLALQENLEHVRMVRKIMKKQLIEVDNCRLLVTAADAVTNATELAFSLDEMKIISTCAKCINGADPSAIDKIGNAQDSFFDNLKRRGSDRCALLFSQLKLDKLSQNFYMISSDDKSKILISILDRIRAKSNSVDLSLVGGAKHAAQMKFDFNAKLNNPASSFVLIDQSVTGMFERRTRIGL

SEQ ID NO: 158 - protein, 1398 aa, Veillonella atypica
METQTSNQLITSHLKDYPKQDYFVGLDIGTNSVGWAVTNTSYELLKFHSHKMWGSRLFEEGESAVTRRGFRSMRRRLERRKLRLKLLEELFADAMAQVDSTFFIRLHESKYHYEDKTTGHSSKHILFIDEDYTDQDYFTEYPTIYHLRKDLMENGTDDIRKLFLAVHHILKYRGNFLYEGATFNSNAFTFEDVLKQALVNITFNCFDTNSAISSISNILMESGKTKSDKAKAIERLVDTYTVFDEVNTPDKPQKEQVKEDKKTLKAFANLVLGLSANLIDLFGSVEDIDDDLKKLQIVGDTYDEKRDELAKVWGDEIHIIDDCKSVYDAIILMSIKEPGLTISQSKVKAFDKHKEDLVILKSLLKLDRNVYNEMFKSDKKGLHNYVHYIKQGRTEETSCSREDFYKYTKKIVEGLADSKDKEYILNEIELQTLLPLQRIKDNGVIPYQLHLEELKVILDKCGPKFPFLHTVSDGFSVTEKLIKMLEFRIPYYVGPLNTHHNIDNGGFSWAVRKQAGRVTPWNFEEKIDREKSAAAFIKNLTNKCTYLFGEDVLPKSSLLYSEFMLLNELNNVRIDGKALAQGVKQHLIDSIFKQDHKKMTKNRIELFLKDNNYITKKHKPEITGLDGEIKNDLTSYRDMVRILGNNFDVSMAEDIITDITIFGESKKMLRQTLRNKFGSQLNDETIKKLSKLRYRDWGRLSKKLLKGIDGCDKAGNGAPKTIIELMRNDSYNLMEILGDKFSFMECIEEENAKLAQGQVVNPHDIIDELALSPAVKRAVWQALRIVDEVAHIKKALPSRIFVEVARTNKSEKKKKDSRQKRLSDLYSAIKKDDVLQSGLQDKEFGALKSGLANYDDAALRSKKLYLYYTQMGRCAYTGNIIDLNQLNTDNYDIDHIYPRSLTKDDSFDNLVLCERTANAKKSDIYPIDNRIQTKQKPFWAFLKHQGLISERKYERLTRIAPLTADDLSGFIARQLVETNQSVKATTTLLRRLYPDIDVVFVKAENVSDFRHNNNFIKVRSLNHHHHAKDAYLNIVVGNVYHEKFTRNFRLFFKKNGANRTYNLAKMFNYDVICTNAQDGKAWDVKTSMNTVKKMMASNDVRVTRRLLEQSGALADATIYKASVAAKAKDGAYIGMKTKYSVFADVTKYGGMTKIKNAYSIIVQYTGKKGEEIKEIVPLPIYLINRNATDIELIDYVKSVIPKAKDISIKYRKLCINQLVKVNGFYYYLGGKTNDKIYIDNAIELVVPHDIATYIKLLDKYDLLRKENKTLKASSITTSIYNINTSTVVSLSNKVGIDVFDYFMSKLRTPLYMKMKGNKVDELSSTGRSKFIKMTLEEQSIYLLEVLNLLTNSKTTFDVKPLGITGSRSTIGVKIHNLDEFKIINESITGLYSNEVTIV

SEQ ID NO: 159 - protein, 795 aa, Prevotella disiens
MEKQRILGLDPGTNSLGWAVLDFDNSKQEYNLVRKGEVIFEEGVGKSKRGEFSKAAYRTFYKSTRKHYFRRRLRKIEVLKVLVKYDFCPYLSDDLLKQWHEKKIYPAVKEFMDWQRTSDAEGKNPYYDRHCCLNEKLDLSLKSDRYVLGRALYHLTQRRGFKSNRLIQNNDENEEGKVKKGISELSTEMQEANCNYLGDYFYKLYTEKGNTVQIRKRYTDREKHYKNEFNAICEKQELNETIVKELDKAIFFQRKLKPQRHGVGKCTFEPNNRRCAISHPDFERFRMLCFINNIKIKTPFEENLRPLNNEEKALIEPLFYRKSIKNFDFEEIAKKLAGKNNYCYIKDDSSKQYKFNYRMSQGASTCQTIAKLKSIFGEEWKNGIAETYTNRRKKEGLKKQAEMVDDIWNVLYSVSECDVLKDFAINKLQLDEKTADNFSKTKLAQGFATLSLKAIRKILPFLEQGFGYTEAVFLANIPTVVGKEYWNNEDIRNDIMEEIKTIFYHNTLKTNDSHNTILFCIKDILSNNFDLAPGAIDKLYHPSMINVYKDVIPNEDGILQLGSPKIDAVKNPMAMRSLHIIRKVVNELLREGIINSDTEVRIEYARELNDANKRHAIADWQKKQYGKHQKYRKEIKELFKAETGFEIEPNETDILKFELWEEQNHICLYTGQEIGISEFVGENPKYDIEHTIPRSLGGDSTKMNMTLCENKFNRENKQKKLPSELANHSEILERIDDWKKKIYILQKKYDSIRTHNGMDKENKDKKIVSMQVRISGSSICVYSQNTLLWLQYGYN

SEQ ID NO: 160 - protein, 1428 aa, unidentified
  source 1..1428: note = Burkholderiales bacterium
MGKTHIIGVGLDLGGTYTGTFITSHPSDEAEHRDHSSAFTVVNSEKLSFSSKSRTAVRHRVRSYKGFDLRRRLLLLVAEYQLLQKKQTLAPEERENLRIALSGYLKRKGYARTEAETDTSVLESLDPSVFSSAPSFTNFFNDSEPLNIQWEAIANSPETTKALNKELSGQKEADFKKYIKTSFPEYSAKEILANYVEGRRAILDASKYIANLQSLGHKHRSKYLSDILQDMKRDSRITRLSEAFGSTDNLWRIIGNISNLQERAVRWYFNDAKFEQGQEQLDAVKLKNVLVRALKYLRSDDKEWSASQKQIIQSLEQSGDVLDVLAGLDPDRTIPPYEDQNNRRPPEDQTLYLNPKALSSEYGEKWKSWANKFAGAYPLLTEDLTEILKNTDRKSRIKIRSDVLPDSDYRLAYILQRAFDRSIALDECSIRRTAEDFENGVVIKNEKLEDVLSGHQLEEFLEFANRYYQETAKAKNGLWFPENALLERADLHPPMKNKILNVIVGQALGVSPAEGTDFIEEIWNSKVKGRSTVHSICNAIENERKTYGPYFSEDYKFVKTALKEGKTEKELSKKFAAVIKVLKMVSEVVPFIGKELRLSDEAQSKFDNPYSLAQLYNLIETERNGFSKVSLAAHLENAWRMTMTDGSAQCCRLPADCVRPFDGFIRKAIDRNSWEVAKRIAEEVKKSVDFTNGTVKIPVAIEANSFNFTASLTDLKYIQLKEQKLKKKLEDIQRNEENQEKRWLSKEERIRADSHGICAYTGRPLDDVGEIDHIIPRSLTLKKSESIYNSEVNLIFVSAQGNQEKKNNIYLLSNLAKNYLAAVFGASDLSQITNEIESTVLQLKAAGRLGYFDLLSEKERACARHALFLNSDSEARRAVIDVLGSRRKASVNGTQAWFVRSIFSKVRQALAAWTQETGNELIFDAISVPAADSSEMRKRFAEYRPEFRKPKVQPVASHSIDAMCIYLAACSDPFKTKRMGSQLAIYEPINFDNLFTGSCQVIQNTPRNFSDKTNIANSPIFKETIYAERFLDIIVSRGEIFIGYPSNMPFEEKPNRISIGGKDPFSILSVLGAYLDKAPSSEKEKLTIYRVVKNKAFELFSKVAGSKFTAEEDKAAKILEALHFVTVKQDVAATVSDLIKSKKELSKDSIENLAKQKGCLKKVEYSSKEFKFKGSLIIPAAVEWGKVLWNVFKENTAEELKDENALRKALEAAWPSSFGTRNLHSKAKRVFSLPVVATQSGAVRIRRKTAFGDFVYQSQDTNNLYSSFPVKNGKLDWSSPIIHPALQNRNLTAYGYRFVDHDRSISMSEFREVYNKDDLMRIELAQGTSSRRYLRVEMPGEKFLAWFGENSISLGSSFKFSVSEVFDNKIYTENAEFTKFLPKPREDNKHNGTIFFELVGPRVIFNYIVGGAASSLKEIFSEAGKERS

SEQ ID NO: 161 - protein, 1025 aa, unidentified
  REGION 1..1025: note = Description of Unknown: gamma Proteobacterium polypeptide
MGGYMPQLMRYRLALDIGSTSIGWAMIRLSMQNEPIAIIRMGVRIFSDGRNPKDGSSLAVTRRVARQMRRRRDRLLKRKTRLLNALVQKKFFPEDADARKALVVLNPYELRKEGLYRQLSGPEFGRALFHISQRRGFLSNRKTDKKDNDSSVLKKAIVDLRQQLEVENCQTIGEWLFKQQQSGKSVRARLRGKTQKDKAYDFYIDRAMIAHEFDTLWVSQAKYDPLLFNEDARAILRDILLYQRPLKPVKPGRCTLIPDESRAPLALPLTQQARIYQELNHLRITTPALGAQALTVAQRNTIAALLEKSDVTFVKIAKALGLTSTTEFNLQDIKRDRLKGNATAIILARNQYFGRRWHDFNADLQNLIVDKLVNEGSETALIEWLKANTDVDESAAERVSGVTLPEGYGSLSVAALRRLLPALKEDVVVYSEAVKRAGFDSHSALSLIEQTGELYQELPYYGEVLQRHVGFGSGDPNDSPERRFGKIANPTVHIGLNELRKIINALIKRYGNPAEVVVELARDLKLSREKRKEIQEEQKQRQDRNEKRIKDACEILGIDPLVIDRGKRREISQKMQLWDELNPKDAANRRCPYTGDQISIEKLLSAEVEIEHILPFSKTLDDSLNNKTVAMRRANRDKGNRTPYEAFGESLNPDYDYDAILQRASLMPREKRKRFASDGYQQWLRDDKDFLSRALNDTAYLSRIAKEYLTLICPPNSVRAIPGRMTAQLRAMFGLNRLLSEGGIKNREDHRHHAIDAAVIGVTDQGLLQKFSRASARTRELQLSRLVDDMPLPWDTYREHVTRALEHLVVSHKPDHGYQGKMHEDTAWGLRDNGQVTRRVRSEDGGPRQRLLENKNVVKINSTRDFSRHGIDEQGQVNAYKGYVGGSNYCIEIWIDEKGKWNSDVVSTFQAYQIVRELGEKAAWQKLRNPLLSLSAKPLVMRLIIDDVVKMQIAGQNKIMRVVKIAQNGQIFFAEHNEANVDARDKDKNNPFKYISKTAGSLQKAGGIHMAISPIGDARPVRYGR

SEQ ID NO: 162 - protein, 1364 aa, Pediococcus acidilactici
MGDRKYNLGLDIGTSSIGFAAVDENNQPIRVKGKTAIGVRLFEEGKTAADRRGFRTTRRRLSRRRWRINLLNEIFDAHLAEVDPTFLARLKESNRSNLDPKKSFQGSLLFPERKDYQFYEEYPTIYHLRKALMEKDRKFDFREIYLAVHHIIKYRGNFLNGTPMRSFKVENIELDTLFDQLNQLYAEIVPDNELAFDLAQVADVKDVLSSTTIYKMDKKKQLVKMMLLPASNKALQSENKKIVTQFVNAILNYKFKLDVLLQVETDADWSLKLNDEGADDKLEEFTGDLDENRLEIIDLLQRLHNWFSLNEITKDGNSLSAAMVEKYENHHHHLGLLKKVIENHPDAKKAKALKETYTAYVGKTDDKTQNQDDFYKAVEKNLDDSPDAKEIKRLIQLDQFMPKQRTGQNGAIPHQLHQQELDQIIEKQSKYYPFLAEPNPNVKRRKDAPYKLDELIAFKIPYYVGPLVTPEEQAQNGENVFAWMKRKAAGPITPWNFDEKVDRMESANRFIRRMTTKDTYLFGEDVLPAESMIYQKFVVLNELNNLKINGRHLSLKDKQDVYNDLFKQQKTVSIKALQNYYVTKKKAATAPTVGGLADPKKFLSSLSTYIDFKNMFGERVNDPQFQEDLEQIVEWSTIFEDRGIFKAKLQALGWLSEKQIQQLVAKRYKGWGRLSKKLLTGLKNAEGYSILDEMWRSTGNFMQIQSRPEFAALIQQANEKQFEGNDPDNVWENIENILGDAYTSPQNKKAIRQVVKVVQDIEKAVGNPPEKIAIEFTREAAANPQRTQSRLRTLEKLYESAEEVVDAGLTAELAEFKENKHVLSDKYYLYFTQLGRDVYTGDTISLDKLNDYDVDHILPQSFIKDDSLDNRVLTIRAVNNGKSDNVPAKMFGKKMGSFWRYLLDNGMISKRKYNNLITDPDNISKYAQKGFINRQLVETSQVIKLTANILNGIYDKDTEIIEVPAKMNSQMRKMFDLVKVREVNDYHHAFDAYLTIFIGNYLYKCYPKLQPYFVYDNFKKFGNKEDIGHKRFNFLGKIEREKKVVAPETGEILWSNVAPNETIKQIKKVYDYKFMIVSREITTRRAELFNQTVYPKNYHGKLIPIKEDRPTDLYGGYSGNTDAYLAIVALEDKKKGKYFKVVGIPTRVAAKLEKLKQQDSQQYLQALHKVIAPQFTKSTKKGIKKTEFEIVLDKVHYRQLVQDGPVKMMLGSSTYKYNAKQLVLSEKALQVIADDRKFDETQKDDNLIAVYDEILSIVNQSFDLYDINGFRKKLNDNRDQFIDLPAETKYEGRKVVAHGKREMILEILKGLHANAAFGNLKPIGFSTAFGQLQVPNGIILSKNAILIHQSPSGLFERKIKLSDL

SEQ ID NO: 163 - protein, 1364 aa, Peptoniphilus duerdenii
MKNLKEYYIGLDIGTASVGWAVTDESYNIPKFNGKKMWGVRLFDDAKTAEERRTQRGSRRRLNRRKERINLLQDLFATEISKVDPNFFLRLDNSDLYREDKDEKLKSKYTLFNDKDFKDRDYHKKYPTIHHLIMDLIEDEGKKDIRLLYLACHYLLKNRGHFIFEGQKFDTKNSFDKSINDLKIHLRDEYNIDLEFNNEDLIEIITDTTLNKTNKKKELKNIVGDTKFLKAISAIMIGSSQKLVDLFEDGEFEETTVKSVDFSTTAFDDKYSEYEEALGDTISLLNILKSIYDSSILENLLKDADKSKDGNKYISKAFVKKFNKHGKDLKTLKRIIKKYLPSEYANIFRNKSINDNYVAYTKSNITSNKRTKASKFTKQEDFYKFIKKHLDTIKETKLNSSENEDLKLIDEMLTDIEFKTFIPKLKSSDNGVIPYQLKLMELKKILDNQSKYYDFLNESDEYGTVKDKVESIMEFRIPYYVGPLNPDSKYAWIKRENTKITPWNFKDIVDLDSSREEFIDRLIGRCTYLKEEKVLPKASLIYNEFMVLNELNNLKLNEFLITEEMKKAIFEELFKTKKKVTLKAVSNLLKKEFNLTGDILLSGTDGDFKQGLNSYIDFKNIIGDKVDRDDYRIKIEEIIKLIVLYEDDKTYLKKKIKSAYKNDFTDDEIKKIAALNYKDWGRLSKRFLTGIEGVDKTTGEKGSIIYFMREYNLNLMELMSGHYTFTEEVEKLNPVENRELCYEMVDELYLSPSVKRMLWQSLRVVDEIKRIIGKDPKKIFIEMARAKEAKNSRKESRKNKLLEFYKFGKKAFINEIGEERYNYLLNEINSEEESKFRWDNLYLYYTQLGRCMYSLEPIDLADLKSNNIYDQDHIYPKSKIYDDSLENRVLVKKNLNHEKGNQYPIPEKVLNKNAYGFWKILFDKGLIGQKKYTRLTRRTPFEERELAEFIERQIVETRQATKETANLLKNICQDSEIVYSKAENASRFRQEFDIIKCRTVNDLHHMHDAYLNIVVGNVYNTKFTKNPLNFIKDKDNVRSYNLENMFKYDVVRGSYTAWIADDSEGNVKAATIKKVKRELEGKNYRFTRMSYIGTGGLYDQNLMRKGKGQIPQKENTNKSNIEKYGGYNKASSAYFALIESDGKAGRERTLETIPIMVYNQEKYGNTEAVDKYLKDNLELQDPKILKDKIKINSLIKLDGFLYNIKGKTGDSLSIAGSVQLIVNKEEQKLIKKMDKFLVKKKDNKDIKVTSFDNIKEEELIKLYKTLSDKLNNGIYSNKRNNQAKNISEALDKFKEISIEEKIDVLNQIILLFQSYNNGCNLKSIGLSAKTGVVFIPKKLNYKECKLINQSITGLFENEVDLLNL

SEQ ID NO: 164 - protein, 1089 aa, Corynebacterium matruchotii
MNSANVNYRVGIDVGSYSLGMAAIAIDDDGKPTEILSAISLIHDSGVDPDSAKSAATRLATSGIARRTRRLYRRKRKRLAKLDKFISSQGWPLKEFEKYEDPFYPWRVRAELATTAITDQQELGEKLSIALRHIARHRGWRNPYSKVTALYTVTEPSDAFLAMQEECAKQLGRTIPETITVGQLVTGMNLGKTRLRGENSLLAARPRQSDNANEIHTIAKVQGLSNELVRQIIDHVFAAESPKGSAAEQVGKDPLQPTKKRALKASDAFQQYRIAALIGNLRIRGGKGNRRLTTEETRLVFDYLRSLPAKQEPTWQLVAEQLKIDRGNLVGTAIMTDDGERAGAKPPVHDTNRIMENTKIKPLATWWKSADADARAAMVKALSNAEVDDFDSQAGAQVQEFFFGISDEDQEKLDGLHLPIGRAAYSEDTLDRLTKRMIGEGMDLYEARQAEFKISNDWAPPAPEIGERVGNPAVDRVLKATARWLNAAERQWGAPKSVNIEHVRAAFMSESSARELDRDNQQRAKRNVKVVAEMQEKLGIEGRPSRADVWRFQSIQRQNGKCAYCGAEISFKNSEMDHIIPQAGEGSTNTRDNLVAVCRECNSSKSNIAFAVWAENTSRPGVSVQKAIERTHHWVTDSGLRKPEFDKFRKQVCDRLRRKATDEPIDARSLESVAWMANELRSRIAQKFKDGDTKVRVYKGALTAEARRASGISGKLEFVDGKGKSRLDRRHHAVDAAVVAFTSNYVAETLALRSNMKFDQELRRKAPQWREFTGSDHVHQVEWTKWKYRMQALAELLNNALVQDRIVVMHNLRLRLGNGAAHEDTIGKLTRLKVGDAISTTDIDRASSEALWCALTRDPDYDPKTGLPENPNRTIRIHGTHLTASDEITVFPVAAASIPIRDGFAKLGSNYHHVRLFRVPSGKKYKYCLMQVYTVDLLKFRKEDLFTVELKPQTISVRTCEALLRKALANGTAEYLGWLVSDDELLIDTSSFDTPGIVKLREEYGPVNRWRLAGLTSVTRLNLRPLYLSKEGLKPNVNPEIKKIIDNRSWIITVNKLFSSGHVKIIRRDALGRPRLHSAAHLPICWEVK

SEQ ID NO: 165 - protein, 1134 aa, Streptococcus mitis
MNGLVLGLDIGIASEGVGILEKNSGKIIHANSRLFPAATADNNVERRKNRQARRLNRRKKHRGVRFQDLFEDYGLLTDFSKVSINLNPYRLRVDGLNQQLTNEELFIALKNIVKRRGISYLDDASEDGGAVSSDYGKAVEENRKLLAEQTPGQIQLERFEKYGQVRGDFTVVENGEKLRLINVFSTSAYKKEAERILRKQQEFNNQITDEFIEDYLKILTGKRKYYHGPGNEKSRTDYGRFRTDGTTLDNIFGILIGKCTFYPEEYRASKASYTAQEFNLLNDLNNLTVPTETKKLSEEQKKVIVEYAKEAKTLGASTLLKYIAKMIDASVDQIRGYRVDVNNKPEMHTFEVYRKMQSLETISVGELSRNVLDELAHILTLNTEREGMEEAINTKLKDSFSQDQVLELVQFRKNNSSLFSKGWHNFSLKLMMELIPELYETSEEQMTILTRLGKQKSKETSKRTKYIDEKELTEEIYNPVVAKSVRQAIKIINEATKKHGIFDNIVIEMARENNEEDAKKDYIKRQKANQDEKNAAMEKAAFQYNGKKELPDNIFHGHKELATKIRLWHQQGEKCLYTGKTIPISDLIYNQYKYEIDHILPLSLSFDDSLSNKVLALATANQEKGQRTPFQALDSMDDAWSYREFKSYVKDLKSLSNKKKDYLLTEEDISKIEVKQKFIERNLVDTRYSSRVVLNALQDFYKSHQFDTTISVVRGQFTSQLRRKWGLEKSRETYHHHAVDALIIAASSQLRLWKKQNNPLITYKEGQFVDSQTGEIISLTDDEYKELVFKAPYDHFVDTLSSKTFEDSILFSYQVDSKFNRKISDATIYATRKAKLDKEKKEYTYTLGKIKDIYSLGTKTPSKTGFYKFLDLYNKDKSQFLMFQKDRKTWDEVIEKIMEQYRPFKEYDKTGKLVDFNPFEKYRQENEPIRKYSKKGNGPEIKSLKYYDILLGKHKNITPEGSRNTVALLSLNPWRTDVYYNMETKKYEFLGLKYADLPFEEGGAYGISTETYNELREKEGIGKNSEFKFTLYKNDLILIKDTETNCQQIFRFWSRTGKDNPKSFEKHKIELKPYEKARFEKGEELEVLGKVPPSSNQLQKNMQIENLSIYKVKTDVLGNKHFIKKEGDKPKLKF

SEQ ID NO: 166 - protein, 1373 aa, Streptococcus bovis
MTKKNYSIGLDIGTNSVGWAVITDDYKVPAKKMKVLGNTDKKYIKKNLLGALLFDSGETAEATRLKRTARRRYTRRKNRLRYLQEIFAEEMTKVDESFFQRLDESFLRWDDDNKKLGRYPIFGNKADVVKYHQEFPTIYHLRKHLADSSEKADLRLVYLALAHMIKFRGHFLIEGELNAENTDVQKIFADFVGVYDRTFDDSHLSEITVDAASILTEKISKSRRLENLIKYYPTEKKNTLFGNLIALALGLQPNFKMNFKLSEDAKLQFSKDSYEEDLGELLGKIGDDYADLFTSAKNLYDAILLSGILIVDDNSTKAPLSASMIKRYVEHQEDLEKLKEFIKANKSELYHDIFKDKNKNGYAGYIENGVKQDEFYKYLKNTLSKIAGSDYFLDKIEREDFLRKQRTFDNGSIPHQIHLQEMHAILRRQGDYYPFLKENQDRIEKILTFRIPYYVGPLARKDSRFSWAEYHSDEKITPWNFDKVIDKEKSAEKFITRMTLNDLYLPEEKVLPKHSHVYETYAVYNELTKIKYVNEQGKDSFFDSNMKQEIFDHVFKENRKVTKEKLLNYLNKEFPEYRIKDLIGLDKENKSFNASLGTYHDLKKILDKAFLDDKVNEEVIEDIIKTLTLFEDKDMIHERLQKYSDIFTADQLKKLERRHYTGWGRLSYKLINGIRNKENNKTILDYLIDDGSANRNFMQLINDDTLPFKQIIQKSQVVGDVDDIEAVVHDLPGSPAIKKGILQSVKIVDELVKVMGDNPDNIVIEMARENQTTNRGRSQSQQRLKKLQNSLKELGSNILNEEKPSYIEDKVENSHLQNDQLFLYYIQNGKDMYTGDELDIDHLSDYDIDHIIPQAFIKDDSIDNRVLTSSAKNRGKSDDVPSLDIVRARKAEWVRLYKSGLISKRKFDNLTKAERGGLTEADKAGFIKRQLVETRQITKHVAQILDARFNTESDENDKVIRDVKVITLKSNLVSQFRKDFEFYKVREINDYHHAHDAYLNAVVGTALLKKYPKLASEFVYGEYKKYDIRKFITNSSDKATAKYFFYSNLMNFFKRVIRYSNGKVIVRPVVEYSKDTEDIAWDKKSNFRTICKVLSYPQVNIVKKVETQTGGFSKESILPKGDSDKLIPRKTKKAYWDTKKYGGFDSPTVAYSVFVVADVEKGKAKKLKTVKELVGISIMERSFFEENPVEFLENKGYHNIREDKLIKLPKYSLFEFEGGKRRLLASASELQKGNEMVIPGHLVKLLYHAQRINSFNSTKYLDYVSAHKKEFEKVLSCVEDFANLYVDVEKNLSKIRAVADSMDNFSIEEISNSFINLLTLTALGAPADFNFLGEKIPRKRYTSTKECLNATLIHQSITGLYETRIDLSKIGEE

SEQ ID NO: 167 - protein, 1099 aa, Corynebacterium accolens
MSLLYRVGIDVGTYSLGCTAIEVDDNDQPVSILSSVSLIHDSGLDPDQQKRAVTRLASSGVARRTRRLYRRRRRRMVKLENFLTAQGWETLPFERYSDPYLPWHARVALVNGYISDDTQRGQYLSIAFRHIANHRGWRNPYWKVSSLYSPDKPSDAFEQIRKELEASTGRQIPETATVGQLISFAQFGKDRLRGGGKQKDKKKPQEQVNQAVISARLHQIDHAREINEICRVQKIDDTLRKQILDLVFAAESPKGAQKGRVGKDPLQPKLFRALKASDAFQQYRIAALTGNLRIYRNGVTVPLDRDEKLIVFNYLVNLPKKEEPSWLKIAEILNIDRGQLRGTATMTDDGERAGATPPVHDTNRTILDSKVKPLAHWWENASDDERAAMLKSLSNSEVEDFDSPAGAQVQAFFADLDETEQEKLDSLHLPMGRAAYSEDTLMRLTNRMLDENLDLYEARLAEFGIPKDWAPPAPRIGEPVGNPAVDRVLKGVARWLEAAADEWGAPKSVVIEHVRDGFVSKSKAIEIDRANNNRHKRNRELFQKMQENLGIEGKVRSSDLWRYQSVQRQNCQCAYCGSPITYTTCEMDHIVPRAGEGSTNTRDNLVATCHRCNLAKKNIPFAVWAEKSTIPGVSVKEALDRTRHWSEDSGMSKKDFQKFRKNVCERLNRTVVDEPLDARSMESVAWMANELRGRVAQRFQEENTTVNVYRGALTAEARRAAGITDKLRFIDGTGKSRLDRRHHAVDAAVVAFIHNYVAETLAIRSNKKREAQLLQGTSQWKEFTGSDDKHRAVWNAWIPKMQKLAVLLQIALDEDRIVVTSNLRLRLGNGRAHEDTISELKTIRVGDAISVTDIDRASSEALWCALTREPDFDEKDGLPENPNRRIRVHGTWYDAEDEIEVFPVGAGAIKVRGGYAKLSRFHHARVYKIPGKKAPIYCMLRVYNTDLVQHRHEDLFSVELKPQTMSVRQAEPKLRKALAENTAEYLGWLVTDDELIIDTSTFRTGLIEEMQSEFGLVRRWRLDGFDSPSLLTLRPLHMSAEGLPDDCALGSRKIIDTKGWRVSINKVFNAGNTTVVRRDALGRARLTSNAHLPISWKEE

SEQ ID NO: 168 - protein, 1054 aa, Actinobacillus pleuropneumoniae
MKLTPLNYILGLDLGIASVGWAVVEIDEQENPLGLIDVGVRTFDRAEVAKTGESLALARRLARSSRRLVKRRADRIKKVKRLLKSENILLSADEQLPNDVWQLRVKGLDQKLERQEWAAVLLHLLKHRGYLSQRKNESKSENKELGALRSGVAANHQILQSAEYRTPAEIAVKKFHVEEGHIRNQRGAYTHTFSRLDLLAEIELLFTRQTELGNPHTSAKLLENLTALLMWQKPALAGEAILKMLGKCTFEPTEYKAAKNSYSAERFVWLTKLNNLRILEQGAERALTDNERFALLDQPYEKAKFTYAQARTMLALPDEAIFKGVRYQGEDKKAVETKTILMEMKAYHQIRKALENADLKAEWNELKNNSELLDDIGTAFSLHKTDEDICRYLDGKLSESILNALLENLNFDKFIQLSLKALQQILPLMLQGQRYDEAVSAIYGDHYGKKSAEINRLLPTIPADEIRNPVVLRTLTQARKVINAVVRLYGSPARIHIETGREVGKSYQDRKKLEKQQEDNRKHRESAVQKFKEYFPNFVGEPKGKDILKMRLYELQQAKCLYSGKSLELHRLLEKGYVEVDHALPFSRTWDDSFNNKVLVLANENQNKGNLTPYEWLDGKNNSEPWQNFVARVQTSGFSHTKKQRILSHKLDEKGFIERNLNDTRYVVRFLCNFIADNMLLTGKGKRKVFASNGQITALLRGRWGLQKVRDDNDRHHALDAVVVACSTVAMQQKITRFVRYEEGNVFSGERIDRETGEIIPLHFPSPWAFFRENVEIRIFSENPKLELENRLPDYPQYNHEFVQPLFVSRMPTRKMTGQGHMETVKSAKRLDEGLSVLKVPLTQLKLNDLERMVNREREMALYESLKVRLEQFDNDPAKAFAEPFYKKGGALVKAVRVEQTQKSGVLVRDGNGVADNASMVRVDVFTKAGKYFLVPIYTWQVAKGILPNKAVTANVDEIDWLEMDESYQFIFTMYPNDLVKVKLKKEEFFGYYGGLDRATGAIVIKEHDLEKSKGRQGIYRIGVKLALSFEKYQVDELGKNIRPCRPTKRQHVR

SEQ ID NO: 169 - protein, 1369 aa, Lactobacillus iners
MNNNYYLGLDLGTNSVGWAVTDDHYNIIKFHGKHMWGMRLFEEAETAKDRRLHRQARRRRQRLVERINLLEELFDKEISKVDQGFFARKKESDLHFEDKTTKSEYALFNDKSYTDRDYYKQYPTIFHLIMDLIENDKKRDIRLVYLACHYLIKHRGHFIFDGKNFTVDNSFENLLDKLITYLKDNDDITLSFPKDQLINIFKNSNLNSTEKSDQLKPFFGRTNLEKGIIKLLSGGKQDLSNMFRDETLKNSNYKNLKFSDNRFDDERDGYAADLGDRIDLLILLKQIYDASILESMMSQARVSIDGHKYISSAKVCAYEKHKSDLKRLKSLIKKYLPSEYNNIFRKITEKDNYVAYSKSNITNNKREKALKYVKYVDFTKYLTKKLKTIKTQDAEDDQEIFEIKGELEKQSFLPKQRTLDNSIIPYQLHLMELKKILDNQSKYYDFLLAKDDQEGITVKDKIISLLTFRLPYYIGPVNPAVHGKFAWVKRLANGKVTPWNYKEKIDIDASHEEFIKTKLSKCSFLIGCDVLPKNSLLYQKYMVLSELNTIKFNGVNISEKLKDDIYQNLFKNIQKVTKKRLQNYIKEHENIIGDVIVTGIDNAFKQGLVSYLKFKKIIGDKVDDDRYQKVLEKIIRDITLYDECAGKKIKKEYKDSDLFTEDELNKIVKLTFNDWGRLSAELLDQLEGEDTVSGETGKIIEFMQKHNYNLMQLMSKKFTFKSKIDEINKSYYQHDKFNYKSMIDSLYVSPATKRILWQSLKVVHEISKIMKHDPEKIFIEMARSKEDHPKRKLSRKADLKQVYKDSKKQIISIIGKDKYQDLSNELDNKDDRDLRWDNLYLYYTQLGRSMYSLKPIDISELMNKNLYDQDHIFPKSKKYDDSIENRVLVEKELNVKKSDIYPISDANIIPQKIKGQVESFWKMLYDHKLIGDKKYARLIRSKAFTDDELAGFIARQLVETRQATKETADLLKRLCPKSRIVYAKAQNASIFRQKFDIPKSRTINDLHHAQDAYLNIVVGNIFDTKFTQDPRNFIKNTKDSRNYNLEKIYDYNVERNNYVAWIAPDGETNGTIANVKCNLSTKDFRVTRPSFYKKGALFNQNLSRKGSNLAPIKEHSPKSNPLKYGGYSGKNNSFFVVVAGKDNKGKDIVKLIPVNTLIYNKMLHCDYKAKQELLTSYVANNFAINNFRIVKDDIKMYSLVKIDGAYYYLVGGTDERIEVKNAMQLLLSKDSIKAVKILEKESKDQFANIKNYKDIDIKLGRTFNEVVSKYTNSVFGKSMLISDKYRKDIFKSVEKSILEFNHLDTIGKADNLLKFVTLMRPSGSAHSLKMVGLIERIRKSNVISNFNEFKLINQSVTGLFENEEDLLKL

SEQ ID NO: 170 - protein, 1420 aa, Bifidobacterium bifidum
MSRKNYVDDYAISLDIGNASVGWSAFTPNYRLVRAKGHELIGVRLFDPADTAESRRMARTTRRRYSRRRWRLRLLDALFDQALSEIDPSFLARRKYSWVHPDDENNADCWYGSVLFDSNEQDKRFYEKYPTIYHLRKALMEDDSQHDIREIYLAIHHMVKYRGNFLVEGTLESSNAFKEDELLKLLGRITRYEMSEGEQNSDIEQDDENKLVAPANGQLADALCATRGSRSMRVDNALEALSAVNDLSREQRAIVKAIFAGLEGNKLDLAKIFVSKEFSSENKKILGIYFNKSDYEEKCVQIVDSGLLDDEEREFLDRMQGQYNAIALKQLLGRSTSVSDSKCASYDAHRANWNLIKLQLRTKENEKDINENYGILVGWKIDSGQRKSVRGESAYENMRKKANVFFKKMIETSDLSETDKNRLIHDIEEDKLFPIQRDSDNGVIPHQLHQNELKQIIKKQGKYYPFLLDAFEKDGKQINKIEGLLTFRVPYFVGPLVVPEDLQKSDNSENHWMVRKKKGEITPWNFDEMVDKDASGRKFIERLVGTDSYLLGEPTLPKNSLLYQEYEVLNELNNVRLSVRTGNHWNDKRRMRLGREEKTLLCQRLFMKGQTVTKRTAENLLRKEYGRTYELSGLSDESKFTSSLSTYGKMCRIFGEKYVNEHRDLMEKIVELQTVFEDKETLLHQLRQLEGISEADCALLVNTHYTGWGRLSRKLLTTKAGECKISDDFAPRKHSIIEIMRAEDRNLMEIITDKQLGFSDWIEQENLGAENGSSLMEVVDDLRVSPKVKRGIIQSIRLIDDISKAVGKRPSRIFLELADDIQPSGRTISRKSRLQDLYRNANLGKEFKGIADELNACSDKDLQDDRLFLYYTQLGKDMYTGEELDLDRLSSAYDIDHIIPQAVTQNDSIDNRVLVARAENARKTDSFTYMPQIADRMRNFWQILLDNGLISRVKFERLTRQNEFSEREKERFVQRSLVETRQIMKNVATLMRQRYGNSAAVIGLNAELTKEMHRYLGFSHKNRDINDYHHAQDALCVGIAGQFAANRGFFADGEVSDGAQNSYNQYLRDYLRGYREKLSAEDRKQGRAFGFIVGSMRSQDEQKRVNPRTGEVVWSEEDKDYLRKVMNYRKMLVTQKVGDDFGALYDETRYAATDPKGIKGIPFDGAKQDTSLYGGFSSAKPAYAVLIESKGKTRLVNVTMQEYSLLGDRPSDDELRKVLAKKKSEYAKANILLRHVPKMQLIRYGGGLMVIKSAGELNNAQQLWLPYEEYCYFDDLSQGKGSLEKDDLKKLLDSILGSVQCLYPWHRFTEEELADLHVAFDKLPEDEKKNVITGIVSALHADAKTANLSIVGMTGSWRRMNNKSGYTFSDEDEFIFQSPSGLFEKRVTVGELKRKAKKEVNSKYRTNEKRLPTLSGASQP

SEQ ID NO: 171 - protein, 1092 aa, Ilyobacter polytropus
MKYSIGLDIGIASVGWSVINKDKERIEDMGVRIFQKAENPKDGSSLASSRREKRGSRRRNRRKKHRLDRIKNILCESGLVKKNEIEKIYKNAYLKSPWELRAKSLEAKISNKEIAQILLHIAKRRGFKSFRKTDRNADDTGKLLSGIQENKKIMEEKGYLTIGDMVAKDPKFNTHVRNKAGSYLFSFSRKLLEDEVRKIQAKQKELGNTHFTDDVLEKYIEVFNSQRNFDEGPSKPSPYYSEIGQIAKMIGNCTFESSEKRTAKNTWSGERFVFLQKLNNFRIVGLSGKRPLTEEERDIVEKEVYLKKEVRYEKLRKILYLKEEERFGDLNYSKDEKQDKKTEKTKFISLIGNYTIKKLNLSEKLKSEIEEDKSKLDKIIEILTFNKSDKTIESNLKKLELSREDIEILLSEEFSGTLNLSLKAIKKILPYLEKGLSYNEACEKADYDYKNNGIKFKRGELLPVVDKDLIANPVVLRAISQTRKVVNAIIRKYGTPHTIHVEVARDLAKSYDDRQTIIKENKKRELENEKTKKFISEEFGIKNVKGKLLLKYRLYQEQEGRCAYSRKELSLSEVILDESMTDIDHIIPYSRSMDDSYSNKVLVLSGENRKKSNLLPKEYFDRQGRDWDTFVLNVKAMKIHPRKKSNLLKEKFTREDNKDWKSRALNDTRYISRFVANYLENALEYRDDSPKKRVFMIPGQLTAQLRARWRLNKVRENGDLHHALDAAVVAVTDQKAINNISNISRYKELKNCKDVIPSIEYHADEETGEVYFEEVKDTRFPMPWSGFDLELQKRLESENPREEFYNLLSDKRYLGWFNYEEGFIEKLRPVFVSRMPNRGVKGQAHQETIRSSKKISNQIAVSKKPLNSIKLKDLEKMQGRDTDRKLYEALKNRLEEYDDKPEKAFAEPFYKPTNSGKRGPLVRGIKVEEKQNVGVYVNGGQASNGSMVRIDVFRKNGKFYTVPIYVHQTLLKELPNRAINGKPYKDWDLIDGSFEFLYSFYPNDLIEIEFGKSKSIKNDNKLTKTEIPEVNLSEVLGYYRGMDTSTGAATIDTQDGKIQMRIGIKTVKNIKKYQVDVLGNVYKVKREKRQTF

SEQ ID NO: 172 - protein, 994 aa, Streptococcus downei
MENQRGKRQRITHQEPYSIGLDIGTASVGSAVINNDLTVPQKRFKVRDINGNVIKTIKKNMSSVLIFDEANPAKGARTKRTSRRRYTRRNFRLLELKKLFEKEIEKIDPNFFHRIKEDSFFNWNDKEFDKHPLFGNLKEEKKFHNNYPTVFHLRNEIGKNSSKKFDLRLVYLALAHIIKYRGHFLDETFDPDASVSVEKRLNDFIVEYNELFDKDLRSEAKFSEILMSDSSNSVKIESTLSLYPSEKNTIFQVFLKLIVGNQGDFNKFFKDELESSSHSGKLVFSSDEVEDEKEELISIIGEDYLDIINLCQSLYSTVALAKIISTDTGESNTPLSASMVKRYNEHKGDLANLKGIVKHFIPEKYEEVFGEHSKTGYTAYIRNPNKMPEKKFYDYLYHEGEKGKISGILSDSRIYELPAVQKFILKIEQKSFLKKQRTKENGLIPYQLHLKELKIIIENQSEYYPFLHEIEEKLEKLLTFRIPYFVGPLAQTKYINPRFNWLVRKSEDHIKPWNFSEIVDEEKSATKFIEKLISNDQFLFGEKVLPKRSIIYQQFLIFNELTKVSYQIKDGPSRNFDSETKEEIFNSLFKKNKLGCVTVVDLKNYIKNDQCLSEKEDIQIEGIKKKFNSSYSTYADLSEISGLKELLDDDTQLDLVEEIIRILTVFEDKKMRTKQLEKLNLPANVDIEKLCKKHYKGWANVSRQLIDGIADRSRGFKKTILDYLKDDDIPNNDAFSTKVQKSLNRNFAQLITDKSLDFARKLDESYKIDVKKDYPSLVEDIPGSPAIRRAILQSLYTVDEIIGVMGRMPKNIVIEMARTNEVSDSPKTRKERIKKLIKETENDADALNFGISKVSEIFDEVKKDENLFKELEVYLYFLQEGKDMYGTETREGHRQPKEINFYDVKNSTGKYHIDHIIPQSLYSGNPLDNIVLTESTNNKIKDKDVPDEATVYEMKNFWLYLMKKGAISKKKFSFLTKIEQGGLSNEDKFGFINR

SEQ ID NO: 173 - protein, 1052 aa, Aminomonas paucivorans
MIGEHVRGGCLFDDHWTPNWGAFRLPNTVRTFTKAENPKDGSSLAEPRRQARGLRRRLRRKTQRLEDLRRLLAKEGVLSLSDLETLFRETPAKDPYQLRAEGLDRPLSFPEWVRVLYHITKHRGFQSNRRNPVEDGQERSRQEEEGKLLSGVGENERLLREGGYRTAGEMLARDPKFQDHRRNRAGDYSHTLSRSLLLEEARRLFQSQRTLGNPHASSNLEEAFLHLVAFQNPFASGEDIRNKAGHCSLEPDQIRAPRRSASAETFMLLQKTGNLRLIHRRTGEERPLTDKEREQIHLLAWKQEKVTHKTLRRHLEIPEEWLFTGLPYHRSGDKAEEKLFVHLAGIHEIRKALDKGPDPAVWDTLRSRRDLLDSIADTLTFYKNEDEILPRLESLGLSPENARALAPLSFSGTAHLSLSALGKLLPHLEEGKSYTQARADAGYAAPPPDRHPKLPPLEEADWRNPVVFRALTQTRKVVNALVRRYGPPWCIHLETARELSQPAKVRRRIETEQQANEKKKQQAEREFLDIVGTAPGPGDLLKMRLWREQGGFCPYCEEYLNPTRLAEPGYAEMDHILPYSRSLDNGWHNRVLVHGKDNRDKGNRTPFEAFGGDTARWDRLVAWVQASHLSAPKKRNLLREDFGEEAERELKDRNLTDTRFITKTAATLLRDRLTFHPEAPKDPVMTLNGRLTAFLRKQWGLHKNRKNGDLHHALDAAVLAVASRSFVYRLSSHNAAWGELPRGREAENGFSLPYPAFRSEVLARLCPTREEILLRLDQGGVGYDEAFRNGLRPVFVSRAPSRRLRGKAHMETLRSPKWKDHPEGPRTASRIPLKDLNLEKLERMVGKDRDRKLYEALRERLAAFGGNGKKAFVAPFRKPCRSGEGPLVRSLRIFDSGYSGVELRDGGEVYAVADHESMVRVDVYAKKNRFYLVPVYVADVARGIVKNRAIVAHKSEEEWDLVDGSFDFRFSLFPGDLVEIEKKDGAYLGYYKSCHRGDGRLLLDRHDRMPRESDCGTFYVSTRKDVLSMSKYQVDPLGEIRLVGSEKPPFVL

SEQ ID NO: 174 - protein, 1023 aa, Helicobacter cinaedi
MKIYSFDIGVASIGWAFIENEVLQDCGIRIFTKAENPKNGASLALPRREARGVRKRLARRRGRLNTIKQLLCKEFGLQLEDYLSNDGELPKAYTASKANPLKSPYELRTLALSQKLDSKDLVRVILHIAKHRGYGNKHAKDSKDTESGKVKKAIEFNRKTLAEKGYRSVGEYLYREFFQQSRISQNNGATEFINVRNKAGNYEHCVAQDMLKEELESILNAQRQFGFSLKQDFENKLLTKIFEQRPLKSFADKVGNCCFIAGEKRAPKDSPSAIEFIALSRTINTLINLSKESGEIYNRAIILQIVESTLKKGEISYKELREIIRLDERLRFKDPRLDYSREIKEAEKVKFLEFKQLKGFKKALGESFTTLAISQLDEIAEHIALIKDRVKLNEKLESYALTKEQREALSNLSFSAHINLSLQALKQILPFMRGDNGEQCLDYDESVEKAGLKALSKDTLKGQMLPPLNEFEPYLSNPVVARALAEYRKVLNVLLKQYGSPHKIHIEYAREAKLSSTERQKYEKEQKDNYAANQAAHKKCQELGLEPSSTNLLKLKLWQEQGGLCLYSGAKITISYLQDPTALQVDHIYPYSRSFDDSYMNKCLVLTKANQEKGNRTPFEAFGTDSAKWGVITTLAQKLPHKKRRRILNTAFNDKEAGFKLRNLNDTSYIARLVADYTETYLEFLPLVESENTTLSKGQKGSKKHIAIVNGVLTSTMRYYLGFASKDRDNHLHHALDAVIIGFMNDSVIKAFSDFKKTQETSKAAYYAHTLSKQEYKKQRAFIQLPSGENFRVSVLEKVESVFVSKPPRKRVRGALHEATFYSPNDPKLLKNYGGTKGVERALALGKMRKVGAKIVSNGAMVRVDIFRHKSSGKFYGVPVYTMDFALGILPNKAVVVGKDQNGVIKDWLEMDSSYEFIFSLYKDDVILVQKKEMQRPELCYFVSFDTSGASIKVAKHDNNFSTLTENQKLLFSNATKEEVVGKSIGIQNLKVFEKWQVSVLGEVKRTQSYPRENISLASKAKK

SEQ ID NO: 175 - protein, 874 aa, Listeria seeligeri
LANGQSEFSWLTRKADGEIRPWNIEEKVDFGKSAIDFIEKMTNKDTYLPKENVLPKHSMCYQKYMVYNELTKIRYTDDQGKTHYFSGQEKQQIFNDLFKQKRKVKKKDLELFLYNMNHVESPTVEGVEDAFNSSFTTYHDLQKVGVPQEILDDPLNTEMLEEIIKILTVFEDKRMINERLQEFSNVLDEAVLKKLERRHYTGWGRLSAKLLIGIRDKESHLTILDYLMNDDKHNRNLMQLINDSNLSFKSIIEKEQVSTADKDIQSIVADLAGSPAIKKGILQSLKIVDELVGIMGYPPQTIVVEMARENQTTGKGKNNSKPRFTSLEKAIKELGSQILKEHPTDNQGLKNDRLYLYYLQNGKDMYTGQELDIHNLSNYDIDHVVPQSFITDNSIDNRVLASSAANREKGDNVPSLEVVRKRKVYWEKLYQAKLMSKRKFDYLTKAERGGLTEADKARFIHRQLVETRQITKNVANILHQRFNCKKDESGNVIEQVRIVTLKAALVSQFRKQFQLYKVREVNDYHHAHDAYLNCVVANTLLKVYPQLEPEFVYGDYHQFDWFKANKATAKKQFYTNIMLFFAKKDRIIDENGEILWDKKYLDTIKKVLNYRQMNIVKKTEIQKGEFSNATANPKGNSSKLIPRKADWDPIKYGGFDGSNMAYAIVIEHEKRKKKTVIKKELIQINIMERTAFEKDQKEFLEGKGYRNPKVITKIPKYTLYECENGRRRMLGSANEAQKGNQMVLPNHLMTLLYHAKNCEASDGKSLAYIESHREMFAELLDSISEFASRYTLADANLEKINTIFEQNKSGDVKVIAQSFVNLLEFNAMGAPASFKYFETNIERKRYNNLKELLNATIIYQSITGLYEARKRLDD

SEQ ID NO: 176 - protein, 1082 aa, Neisseria lactamica
MAAFKPNPMNYILGLDIGIASVGWAMVEIDKEENPIRLIDLGVRVFERAEVPKTGDSLAMARRLARSVRRLTRRRAHRLLRARRLLKREGVLQDADFDENGLVKSLPNTPWQLRAAALDRKLTCLEWSAVLLHLIKHRGYLSQRKNEGETADKELGALLKGVADNAHALQTGDFRTPAELALNKFEKESGHIRNQRGDYSHTFSRKDLQAELNLLFEKQKEFSNPHVSDSLKEGIETLLMAQRPALSGDAVQKMLGHCTFEPAEPKAAKNTYTAERFIWLTKLNNLRILEQGSERPLTDTERATLMDEPYRKSKLTYAQARKLLGLEDTAFFKGLRYGKDNAEAPTLMEMKAYHAISRALEKEGLKDKKSPLNLSTELQDEIGTAFSLFKTDKDITGRLKDRVQPEILEALLKHISFDKFVQISLKALRRIVPLMEQGKRYDEACAEIYGDHYCKKNAEEKIYLPPIPADEIRNPVVLRALSQARKVINCVVRRYGSPARIHIETAREVGKSFKDRKEIEKRQEENRKDREKAAAKFREYFPNFVGEPKSKDILKLRLYEQQHGKCLYSGKEINLVRLNEKGYVEIDHALPFSRTWDDSFNNKVLVLGSENQNKGNQTPYEYFNGKDNSREWQEFKARVETSRFPRSKKQRILLQKFDEEGFKERNLNDTRYVNRFLCQFVADHILLTGKGKRRVFASNGQITNLLRGFWGLRKVRAENDRHHALDAVVVACSTVAMQQKITRFVRYKEMNAFDGKTIDKETGEVLHQKAHFPQPWEFFAQEVMIRVFGKPDGKPEFEEADTPEKLRTLLAEKLSSRPEAVHEYVTPLFVSRAPNRKMSGQGHMETVKSAKRLDEGISVLRVPLTQLKLKGLEKMVNREREPKLYDALKAQLETHKDNPAKAFAEPFYKYDKAGNRTQQVKAVRIEQVQKTGVWVRNHNGIADNATMVRVDVFEKGGKYYLVPIYSWQVAKGILPDRAVVAFKDEEDWTVMDDSFEFRFVLYANDLIKLTAKKNEFLGYFVSLNRATGAIDIRTHDTDSTKGKNGIFQSVGVKTALSFQKNQIDELGKEIRPCRLKKRPPVR

SEQ ID NO: 177 - protein, 1326 aa, Streptococcus pseudoporcinus
MLGTVLFDSGETAQARRLKRTNRRRYTRRRYRLCQLQNIFATEMVKVDDTFFQRLSESFFYYQDKAFDKHPIFGNSKEERAYHKTYPTIYHLRKDLADRDQKADLRLIYLALSHIIKFRGHFLIEGKLNSENTDVQKLFIALVTVYNLLFEEEPIAGETCDAKALLTAKTSKSKRLESLISEFPGQKKNGLFGNLLALALGLRPNFKSNFGLSEDAKLQITKDTYEEELDNLLAEIGDHYADLFLAAKNLSDAILLSDILTLSDENTRAPLSASMIKRYEEHQEDLALLKKLVKEQMPEKYWEIFSNAKKNGYAGYIEGKVSQEDFYRYIKPILSRLKGGDEFLAKIDRDDFLRKQRTFDNGSIPHQIHLKELHAILRRQEKYYPFLAEQKEKIEQLLCFRIPYYVGPLAKGGNSSFAWLKRRSDEPITPWNFKDVVDEEASAQAFIEGMTNYDTYLPEEKVLPKHSPLYEMFTVYNELTKVKYIAENMTKPLYLSAEQKEAIIDHLFKQTRKVTVKDLKEKYFSQIEGLENVDVTGVEGAFNASLGTYNDLLKIIKDKAFLDDEANAEILEEIVLILTLFQDEKLIEKRLAKYANLFEKSVLKKLRKRHYRGWGRLSRQLIDGMKDKASGKTILDFLKADDFANRNFIQLINDSSLDFEKLIDDAQKKAIKRESLTEAVANLAGSPAIKKGILQSLKVVDEIVKVMGHNPDNIVIEMSRENQTTAQGLKNARQRLKKIKEVHKKTGSRILEDNSERITNLTLQDNRLYLYLLQDGKDMYTGQDLDINNLSQYDIDHIIPQSFIKDNSIDNLVLTTQKANRGKSDNVPSIEVVRDMKDRVWRRQLANGAISRQKFDHLTKAERGGLADSDKARFLRRQLVETRQITKHVAQLLDSRFNSKSNQNKKLARNVKIITLKSKIVSDFRKDFGLYKLREVNNYHHAHDAYLNAVVGTALLKKYPKLEAEFVYGDYKHFDLVKLISKSDPSLGKATAKVFFYSNIMNFFKEELSLADGTLMKRPVIETNTETGEVVWDKVKDFKTIRKVLSYPQVNIVKKTEIQSGAFSKESVLSKGNSDKLIERKKGWDPKKYGGFDSPNTAYSIFVVAKVAKRKAQKLKTVKEIVGITIMEQAEYEKDNIAFLEKKGYQDIQEKLLIKLPKYSLFELENGRRRLLASANEFQKGNELALSGKYMKFLYLASRYDKLSSKIESEQQKKLFVEQHLHYFDEILDIVVKHATCYIKAENNLKKIISLYKKKEAYSINEQALNMLNLFIFTSLGAPSTFVFFDETIDRKRYTTSSDVLNGILIQQSITGLYETRIDLSRFGGD

SEQ ID NO: 178 - protein, 1150 aa, Enterococcus faecalis
MYSIGLDLGISSVGWSVIDERTGNVIDLGVRLFSAKNSEKNLERRTNRGGRRLIRRKTNRLKDAKKILAAVGFYEDKSLKNSCPYQLRVKGLTEPLSRGEIYKVTLHILKKRGISYLDEVDTEAAKESQDYKEQVRKNAQLLTKYTPGQIQLQRLKENNRVKTGINAQGNYQLNVFKVSAYANELATILKTQQAFYPNELTDDWIALFVQPGIAEEAGLIYRKRPYYHGPGNEANNSPYGRWSDFQKTGEPATNIFDKLIGKDFQGELRASGLSLSAQQYNLLNDLTNLKIDGEVPLSSEQKEYILTELMTKEFTRFGVNDVVKLLGVKKERLSGWRLDKKGKPEIHTLKGYRNWRKIFAEAGIDLATLPTETIDCLAKVLTLNTEREGIENTLAFELPELSESVKLLVLDRYKELSQSISTQSWHRFSLKTLHLLIPELMNATSEQNTLLEQFQLKSDVRKRYSEYKKLPTKDVLAEIYNPTVNKTVSQAFKVIDALLVKYGKEQIRYITIEMPRDDNEEDEKKRIKELHAKNSQRKNDSQSYFMQKSGWSQEKFQTTIQKNRRFLAKLLYYYEQDGICAYTGLPISPELLVSDSTEIDHIIPISISLDDSINNKVLVLSKANQVKGQQTPYDAWMDGSFKKINGKFSNWDDYQKWVESRHFSHKKENNLLETRNIFDSEQVEKFLARNLNDTRYASRLVLNTLQSFFTNQETKVRVVNGSFTHTLRKKWGADLDKTRETHHHHAVDATLCAVTSFVKVSRYHYAVKEETGEKVMREIDFETGEIVNEMSYWEFKKSKKYERKTYQVKWPNFREQLKPVNLHPRIKFSHQVDRKANRKLSDATIYSVREKTEVKTLKSGKQKITTDEYTIGKIKDIYTLDGWEAFKKKQDKLLMKDLDEKTYERLLSIAETTPDFQEVEEKNGKVKRVKRSPFAVYCEENDIPAIQKYAKKNNGPLIRSLKYYDGKLNKHINITKDSQGRPVEKTKNGRKVTLQSLKPYRYDIYQDLETKAYYTVQLYYSDLRFVEGKYGITEKEYMKKVAEQTKGQVVRFCFSLQKNDGLEIEWKDSQRYDVRFYNFQSANSINFKGLEQEMMPAENQFKQKPYNNGAINLNIAKYGKEGKKLRKFNTDILGKKHYLFYEKEPKNIIK

SEQ ID NO: 179 - protein, 1150 aa, Enterococcus faecalis
MYSIGLDLGVSSVGWSVIDERTGNVIDLGVRLFSAKNSEKNLERRTNRGGRRLIRRKTNRLKDAKKILAAVGFYEDKSLKNSCPYQLRVKGLTEPLSKGEIYKVTLHILKKRGISYLDEDDTEAAKESQDYKEQVRENAQLLTKYTPGQIQLQRLKENNRVKTGINAQGNYQLNVFKVSAYANELATILKTQQAFYPNELTDDWIALFVQPGIAEEAGLIYRKRPYYHGPGNEANNSPYGRWSDFKKTGQPATNIFDKLIGKDFQGELRASGLSLSAQQYNLLNDLTNLKIDGEIPLSPEQKEYILAELMTKEFTRFGINDVAKLLGVKKERLSGWRLDKKGKPEIHTLKGYRNWRKIFAESGIDLATLPTETIDCLAKVLTLNTEREGIENTLAFELPELAESVKLLVLDRYKELSQSVSTQAWHRFSLKTLHLLIPELMNATSEQNTLLEQFQLKSDVRKRYSEYKKLPTKDVLTEIYNPTVNKTVSQAFKVIDALLVKYGKEQIRYITIEMPRDDNEEDEKKRIKELHAKNSQRKNDSQSYFMQKSGWSQEKFQTTIQKNRRFLAKLLYYYEQDGICAYTGLSISPELLVSDSTEIDHIIPISISLDDSINNKVLVLSKANQVKGQQTPYDAWMDGSFKKINGKFSNWDDYQKWVESRHFSHKKENNLLETRNIFDSEQVEKFLARNLNDTRYASRLVLNTLQSFFANQETKVRVVNGSFTHTLRKKWGADLDKTRETHHHHAVDATLCAVTPFVKVSRYHYAVKEETGEKVMREIDFETGEIVDEMSYREFKKSKKYERKTYQVKWPNFREQLKPVNLHPRIKFSHQVDRKANRKLSDATIYSVREKTEVKTLKSGKQKITTDEYTIGKIKDIYTVDGWEAFKKKQDKLLMKDLDEKTYERLLSIAETTPDFQEVEEKNGKVKRVKRSPFAVYCEENDIPAIRKYAKNNNGPLIRSLKYYDGKLNKHINITKDSQGRPVEKTKNGRKVTLQSLKPYRYDIYQDLETKAYYTVQLYYSDLRFVEGKYGITEKEYMKKVAEQTKGQVVRFCFSLQKNDGLEIEWKDSQCYDVRFYNFQSANSINFKGLEQEMMPAENQFKQKPYNNGAINLNIAKYGKEGKKLRKFNTDILGKKHYLYYEKEPKNIIK

SEQ ID NO: 180 - protein, 1345 aa, Streptococcus anginosus
MDQKYSIGLDIGTNSVGWAVVTDDYKVPAKKMKVLGNTDKQSIKKNLLGALLFDSGETAEATRLKRTARRRYTRRRNRLRYLQEIFAEEMNKVDENFFQRLDDSFLVDEDKRGERHPIFGNIAAEVKYHDDFPTIYHLRKHLADISQKADLRLVYLALAHMIKFRGHFLIEGQLKAENTNVQALFKDFVEVYDKTVEESHLSEMTVDALSILTEKVSKSRRLENLIAHYPAEKKNTLFGNLIALSLGLQPNFKTNFQLSEDAKLQFSKDTYEEDLEGLLGEIGDEYADLFASAKNLYDAILLSGILTVDDNSTKAPLSASMVKRYEEHQKDLKKLKDFIKVNAPDQYNAIFKDKNKKGYAGYIENGVKQDEFYKYLKGILLQINGSGDFLDKIDREDFLRKQRTFDNGSIPHQIHLQEMHAILRRQEEHYPFLKENQDKIEKILTFRIPYYVGPLARKGSRFAWAEYKADEKITPWNFDDILDKEKSAEKFITRMTLNDLYLPEEKVLPKHSLLYETFTVYNELTKVKYVNEQGEAKFFDANMKQEIFDHVFKENRKVTKDKLLNYLNKEFEEFRIVNLTGLDKENKAFNSSLGTYHDLRKILDKSFLDDKANEKTIEDIIQTLTLFEDREMIRQRLQKYSDIFTKAQLKKLERRHYTGWGRLSYKLINGIRNKENKKTILDYLIDDGYANRNFMQLINDDALSFKEEIARAQIIGDVDDIANVVHDLPGSPAIKKGILQSVKIVDELVKVMGHNPANIIIEMARENQMTDKGRRNSQQRLKLLQDSLKNLDNPVNIKNVENQQLQNDRLFLYYIQNGKDMYTGETLDINNLSQYDIDHIIPQAFIKDNSLDNRVLTRSDKNRGKSDDVPSIEVVHEMKSFWSKLLSVKLITQRKFDNLTKAERGGLTEEDKAGFIKRQLVETRQITKHVAQILDERFNTEFDGNKRRIRNVKIITLKSNLVSNFRKEFELYKVREINDYHHAHDAYLNAVVGNALLLKYPQLEPEFVYGEYPKYNSYRSRKSATEKFLFYSNILRFFKKEDIQTNEDGEIAWNKEKHIKILRKVLSYPQVNIVKKTEEQTGGFSKESILPKGESDKLIPRKTKNSYWNPKKYGGFDSPVVAYSILVFADVEKGKSKKLRKVQDMVGITIMEKKRFEKHPVDFLEQRGYRNVRLEKIIKLPKYSLFELENKRRRLLASARELQKGNELVIPQRFTTLLYHSYQIEKNYEPEHREYVEKHKDEFKELLEYISVFSRKYVLADNNLTKIEMLFSKNKDAEVSSLAKSFISLLTFTAFGAPAAFNFFGENIDRKRYTSVTECLNATLIHQSITGLYETRIDLSKLGED

SEQ ID NO: 181 - protein, 849 aa, Listeria ivanovii
  VARIANT 780: note = MOD_RES - Any naturally occurring amino acid
LIDKNGTPQHITMIDKMRGKCTYFPEEVRIAKMSYTAELFGLLNDFNNIYFADPETGEKIGFTEADKKYFIDTFIHDQKGVKNITLKQIMKHKNIINETDIFGYRINTKNGTPIFTEFKGLKALKKALKEVDLPDEFYQNTEMMDEIANILSSEKSFTRREEQLKELFLAAFNDELEEAVKELINDITFKEFHSLSKKAIMVILPELWSTNQNQMQLFVQHKMDKSRLENLQNGTKIQFDDEAILSTIAKRAHRETIKIVDAVRAKYGELDYVIVEMAREKNSDEQKKVYNRAQKKQGDFEKEMCKLLGVSELKELRLNGKQHLALKFWKEQDGKCIYSGKPIALSDIVNNFNGLLEIDHIIPISISYDDSQQNKVLCLRSENQRKGQLSPYQYLIRGMGERSFDAFKAEVLSRHFGKKKQNYLLEMEDIANNDELRKHFINRNLVDTRYAMRTFSNTLKTFYTVNGIPTKVMPVNGAMTSALRKRAKLNKDRDAGHAHHAIDALIVAAIGRLPLIKQLAELRVNEEGEFADKITDKGLDDKTAFDDKTLKFLRNLLNYESKVKYSHKVDRKPNRSLSKQTLYSTREKDGEKYIIGKVKNIYTLDKAGYAALKKRIDKNPEDFLMAQHNPKTWEEIIKIMEVYSKADNPFKEFYDEHGFIMKDGKVPVKSLRYHDKKLGIHVPLTHKYENTRHDVVLLKRNSLRVDIYMNKEGVYKYQGVPYNWFNQKGDKYILDMEKYHNEIDGTRASFKNIDNTFEFQFSLYKNDVFSYMKKDKEGEXVSYTKLFRSDSSPRENRLEVENIDMRTSSQQMPTINPLKNLIKYNTDILGNTYPIQKEKFVTVFTLHSK

SEQ ID NO: 182 - protein, 1457 aa, Prevotella buccae
MKTILGLDLGTNSIGWAKVSVDDYGNYLHDIKLGSRIIPMSQDVLGNFDSGVTVSQTAQRTEFRSKRRLVQRNLQRRERLHRVLHVLDFLPAHYDAAIGWDRTEAVTYGKFLNHAEPKLAWEELGNGKRRFLFMDSFHEMVADFARCQPALVADGKKIPLDWTIYYLRKKALTQAITKEELAWILLNFNQKRGYYQLRGEEEEENPTKQEEYYELKVVSVEATDSRKGNDTWYNVHLENGWIYRRSSKISLDDWVGKVKQFIVTTEYEKDGATLKTDKEGYVKRSFRAPNENDWGLRKKRTETLLEMSGKTVGAFIYDHLLQEPADKIRGNFIRTIERHYYKAELEAILAEQCKYHIELRDKEMLEACARELYLNNLPHQRSLMKKDMTYLLLYDLIFYQRPLKSKKALIANCPYEYYEYVDKETGEIKRQNIKCIAKSNPYFQEFRLWQFVLNLRLFDRVEDKEVTANYLPTADDHARLFTYLNDRKEINQETLLKDYFKLKKVKIGNEKEYPIRWNYIEDKEKKYPCNETRYELLMALDRAGIEHKWLDDNNLEYRLWHLLYSVEVKSESETALRKLKNDDAFVNSFLKVKPFKKEYGAYSEKAIKRLLAVMRKGFLWNEQDICDETRKRIEIIIKGDVDEKVKERMGHAAYSFDRVSDFQGLPEWLACYVVYGRHSEAMDIQHWDSPERLMAYINNFKQYSLRNPIVEQCILETLRTVHDIWKETGQIDEIHVELGREMKSTSEERARRTQNVLRNENTNLRIKSLLIELKNDTDICNVHPYSPMQQEILRIYEEGALQELNREDEDFEEISKISQMSQPSGKELNRYKLWLEQKYRSPYTGKAISLAKLFTPAYQIEHVIPQSRYFDDSFTNKVICEAEVNTLKSNLLGYEFIKKHGGEIIHCTTLGDVRIFSESEYKAFVMDHYANNKSKKDKLLMEDIPQEFLSRQMNDSRYISKVVKTLLSNIVRMADESEATSKSVIVCTGGVTDRLKKDWGLNDVWNSIVYSRFERLNRLTGTEAFGHWENKDGKRVFQTSMPLELQRGFRKKRIDHRHHAMDALVIACASRNIVNYLNNESANNPKKREDLRRQLCDKNRVIRKPWETFTQDAYNALENVVVSFKNYVRVINKATNRYEHYDENGKKRFVQQKGSELWAIRKPMHKETYYGHVNLRRKELVTLQKALDDIPSICDKKLRDYISALVEKHFNKRQLLAHFKSTDYYWQKQYVNKVYVWTFSDDIKPLVATRKLLDTSFDAKRIGTITDTGIQKILRNYLEAKGGNATLAFTPEGIAEMNQNISKYNDGKPHQPILKVRITEPMGAKYRVGQTGNKMAKYVEAQSGTNLYFAIYEDSEGKRSYTTVPLDEVAERLKQRLSPVPEKDENDVPLKFYLSPNDLVYVPTEEELQLRECKLNKDRIYKMVSSTGNECHFIPYYVANVIYNKGGFNMQMHRPQS

SEQ ID NO: 183 - protein, 1330 aa, Enterococcus italicus
MKNDYTIGLDIGTNSVGYSVVTDDYKVISKKMNVFGNTEKKSIKKNFWGVRLFESGQTAQEARMKRTSRRRIARRKNRICYLQEIFQPEMNHLDNNFFYRLNESFLVADDAKYDKHPIFGTLDEEIHFHEQFPTIYHLRKYLADGDEKADLRLVYLAIAHIIKFRGNFLIEGELNTENNSVIELSKVFVQLYNQTLSELEGFQFIDESIDFSEVLTQQLSKSERADNVLKLFPDEKGTGIFAQFIKLIVGNQGNFKKVFQLEEDQKLQLSTDDYEENIENLLAIIGDEYGDIFVAAQNLYQAILLAGILTSTEKTRAKLSASMIQRYEEHAKDLKLLKRFVKEHIPDKYAEIFNDATKNGYAGYIDGKTKEEEFYKYLKTTLVQKSGYQYFIEKIEQENFLRKQRIYDNGVIPHQVHAEELRAILRKQEKYYSFLKENHEKIEQIFKVRIPYYVGPLAKHNEQSRFAWNIRKSDEPIRPWNMNDVVDENASAVAFIERMTIKDIYLNENVLPRHSLIYEKFTVFNELTKVLYADDRGVFQRFSAEEKEDIFEKLFKSERKVTKKKLENYLRIELSISSPSVKGIEEQFNANFGTYLDLKKFDELHPYLDDEKYQDTLEEVIKVLTVFEDRSMIQNQLEQLPLNLSTKTIKALSRRKYTGWGRLSARLIDGIHDKNSGKTILDYLIEDESDSYIVNRNFMQLINDDHLSFKKIIEDSQPYKEQQSAEEIVSELSGSPAIKKGILQSLKIVDELVAIMGYKPKNIVVEMARENQTTGRGKQNSKPRLKGIENGLKEFSDSVLKGSSIDNKQLQNDRLYLYYLQNGKDMYTGHELDIDHLSTYDIDHIIPQSFLTDNSIDNRVLTTSKSNRGKSDNVPSEEVVRKMDRFWRKLLNAKLISERKYTNLTKKELTESDKAGFLKRQLVETRQITKHVATILDSKFNEDSNNRDVQIITLKSALVSEFRKTFNLYKVREINDLHHAHDAYLNAVVALSLLRVYPQLKPEFVYGEYGKNSIHDQNKATIKKQFYSNITRYFASKDYIINDDGEILWNKQETIAQVIKTLGMHQVNVVKKVEIQKGGFSKESIQPKGESQKLIRRKQQWNTKKYGGFDSPVVAYAILLSFDKGKRKARSFKIVGITIQDRESFEGNPILYLSKKDYHNPKVEAILPKYSLFEFENGRRRMVASASETQKGNQLIIPGHLMELLYHSKKIINGKNSDSVSYIQNNKEKFREIFEYIVDFSSKYISADANLNKIEKIFENNFHKASEQEIAKSFINLLTFTAMGAPADFEFFGEKIPRKRYVSISEIIDAVFIHQSITGLYETRVRLTEV

SEQ ID NO: 184 - protein, 1123 aa, Mobiluncus curtisii
MFVYLNSPRGFGPATFLTDLPHFCIIFGNNDFMDNRKYHVGIDVGTNSVGFAAVEVGDSGSPIRFLNTMVVIHDSGVDPEQKKYAITRLASAGTARRTRRLYRTRRQRLRELDDFISNELGYPLVNLENFADPYEPWKVRADLATIKLPADELPEAMSIALRHMARHRGWRSPYQRVEALHLHAEISEEFSALKKRVMEKTGDVFSDDATPAEVLVDLMGRQKIRGADGMLSGKLRQSDNANELRKIASVQGIDDETLNRIIDRVFFSRSPKGKASERVGMDALPGQGSKPRALKAMPSFQKFRIVSVICNLRIKDSGDDNRPLSMEEKEQLIGYLMSSTTDDHVTWTDVAELLHVKRSNLQGTAKEGPDGERPYTRPPVNSAWSKIKDSKIKSLVALWKTGDVDVQSAIVEALSNASVLEDARPGADIVVAYLESLDDKELESLDKVGLPAGRASYSEDSLERLTERMLQDDCDLFEARKREFGVSDDWKPPADPIYAPVGNPGVDRVLKIVNRLLMAAEREWGAPTQINIEHVRSGFSSELMQREFERENERRRAQNEEAVKAILTEKGGNSHVSKYDIIRYYAVKRQNCQCLYCGTPITFSDCELDHIVPRKGVGSTNSRVNLAAACRSCNRDKSNLPFAVWAGKTSNFDVSIDGAVSRVKQWQRSQNEGAREFRAFQNEVISRLLKTTEDPEIDSRSLESVAWMARELHHRVEYYFQSKGAQTQVSVYRGAVTAQARKSSGLEDKVKMIGGGGKTRLDRRHHAMDAATIALMTPGISTTLSEKNNLRDAQKFTGQSETWKDYCGRTETAREHFAVWKSNMERLTDLFNDKLENDAIPVVQPLRLRLSDSKAHDDGIGKLDSKKLGSVWSLADIDRAATPQIWTALTRCDDFDPTKGLPENANRVIRAQGVKYESEDNIPVFPSNVAAIAVRDGYAEIGSTIHHARIYRIDDGKKIFYSMIRVFAVDLLKHQAEDLFTVKLPPSAISIRTCEDSLRRALSNGTAEYLGWLVPGDEIIVDTSDKAFHTGQIGDLLRNFPVNSFRLTGFPSNSRLRLKPVLLAGEGLRDDAEDSIKKILSGQGWRPAINVLFSKGKPRIVRRNSLGIERPSSNNGLPFSWEA

SEQ ID NO: 185 - protein, 1054 aa, Staphylococcus lugdunensis
MNQKFILGLDIGITSVGYGLIDYETKNIIDAGVRLFPEANVENNEGRRSKRGSRRLKRRRIHRLERVKKLLEDYNLLDQSQIPQSTNPYAIRVKGLSEALSKDELVIALLHIAKRRGIHKIDVIDSNDDVGNELSTKEQLNKNSKLLKDKFVCQIQLERMNEGQVRGEKNRFKTADIIKEIIQLLNVQKNFHQLDENFINKYIELVEMRREYFEGPGKGSPYGWEGDPKAWYETLMGHCTYFPDELRSVKYAYSADLFNALNDLNNLVIQRDGLSKLEYHEKYHIIENVFKQKKKPTLKQIANEINVNPEDIKGYRITKSGKPQFTEFKLYHDLKSVLFDQSILENEDVLDQIAEILTIYQDKDSIKSKLTELDILLNEEDKENIAQLTGYTGTHRLSLKCIRLVLEEQWYSSRNQMEIFTHLNIKPKKINLTAANKIPKAMIDEFILSPVVKRTFGQAINLINKIIEKYGVPEDIIIELARENNSKDKQKFINEMQKKNENTRKRINEIIGKYGNQNAKRLVEKIRLHDEQEGKCLYSLESIPLEDLLNNPNHYEVDHIIPRSVSFDNSYHNKVLVKQSENSKKSNLTPYQYFNSGKSKLSYNQFKQHILNLSKSQDRISKKKKEYLLEERDINKFEVQKEFINRNLVDTRYATRELTNYLKAYFSANNMNVKVKTINGSFTDYLRKVWKFKKERNHGYKHHAEDALIIANADFLFKENKKLKAVNSVLEKPEIESKQLDIQVDSEDNYSEMFIIPKQVQDIKDFRNFKYSHRVDKKPNRQLINDTLYSTRKKDNSTYIVQTIKDIYAKDNTTLKKQFDKSPEKFLMYQHDPRTFEKLEVIMKQYANEKNPLAKYHEETGEYLTKYSKKNNGPIVKSLKYIGNKLGSHLDVTHQFKSSTKKLVKLSIKPYRFDVYLTDKGYKFITISYLDVLKKDNYYYIPEQKYDKLKLGKAIDKNAKFIASFYKNDLIKLDGEIYKIIGVNSDTRNMIELDLPDIRYKEYCELNNIKGEPRIKKTIGKKVNSIEKLTTDVLGNVFTNTQYTKPQLLFKRGN

SEQ ID NO: 186 - protein, 586 aa, Pseudoramibacter alactolyticus
MTYYLGLDMGTGSVGWAATDKNYKLIRAKGKDLWGVRLFQTAKTAAERRSHRVARLRRQREKVRIGYLKTIFSDAINKVDPGFFQRLDDSFFYAEDKNINQPYALFADTGYTDVDYYRDYPTIFHLRSTLIHDTSPKDVRLVYLAVLNMFKHRGHFLASNLSENGVDDFGDIYQQWCKSVPKPVQISDPEAKTEKIENILSKAGISNTRRLEALLEVFGIKRRDAFAEVLKLWCGLKGNLSKIWSETDFSDLDNTKPALSFKDSNLDMVLSQLEEILPDEDYSWLMLTKQIYDWSLLSGMMKDASGKSYDYLSDARVASYQKHSEDLKTLKRFYHDNHLSAAYDQMFRVMGKDNYSAYAGSVQSKKEVVRRGASCGIEELYKRIKKDLKPVPDCETKQIILENIERGTFLPKQLTRDNGVIPNQIHVHELKAILKNAENYLPFLKEGSELTNSEKILQLFQFQIPYYVGPLYSDENNYAWVVRKEGGRVFPWNFAEKVDEKASAEGFISELVARCTYLDNEKVLPKASLLYEKFMVLNELNNLRINGERISVDIKQELYQNLFTRGKKVTLKKSEGLFGGQRIFCL

SEQ ID NO: 187 - protein, 1385 aa, Gemella morbillorum
MKNKTWYLGLGVGPTSIGWAATDSNYKLLRKNKKRLWGVRLFEEAKTAVDRRTFRAERRRLARRKWRISLLEELFAKEVSKNDPNFFLRLKESKYHFEDKSLMNEYILFNDKDYTDKDYYKEYPTIYHLRLSLTTEENPDIRKVYLAVHSMLKNRGHFLLQGQSFNDSNIDSVIKELLELETVKINFEVTDEVIHSLKKIALEKKNLSDKNNDVKKLYPKEKQLQEIFKLVFGGKTSLDKLYDIEEYKELDNSVKSISFKEKVYEEVRPDYEQILSNYIELLDLAKLVYDSIVLADIKKEGKTISESKVELYNKHKDDLANLKKLVKIDSKLSEDKKKEVYFTIFKEDKEKGTNYVNYTHRSQEGKSCSYEDFKKFLKKELEKLEDSPTKTTILEELDLETFLPLQRTKDNSVVPYQIHKEELVKILDNAAKYHSFLAEKDDSGYSTREKVVQLFEFRIPYYIGPLNAHHNTENGGYSWAIRKKGMESVPVTPWNFKDVIDESASAEAFVNNLKNKCAYLSGEDVLPKNSLLYSEYALLNELNALRYEGNRISVEARDVIVTKLFKEQGKKVTKKTIKELLKTEGFIDGKGEIVGIDNIVKNDLKSYRDFKKILADKFDKERVENIILWITLYGESRKLIKEKITKVYGDFYTVDEIEKMSRLTYKDWGILSRKLLTELVSEKLYNEETGECLNIIGAMRQGTILFMELLADKFDYMSQIKNHNKENKDDITEITPDILENLHASPAVKRSIWQTVRIVEELKTIIGCVPTKIFIETTKRNNAPYKVPTLNRNDLVTKYKTIREHEIFELEKELKNTLDFTLNKNRLINEEPSKLKATKLYLYYTQLGRCMYTGKKIDLGELFDNNNKYDIDHIYPQSKVKDGSFNNIVLVTKASNDMKADVFPLKSKFQTKENKIFWRFLKEKKLITEEKYNRLVRTEEFSNGELTGFITRQLVETSQAIKVISNVLRELNPETTICYSKAENVSSFRQSFGKIKEANRKAENNEKLIRVQEINDYYNAKDAYLSIVVGNVYDVKFTRNVHNFIKNNKDARRYSLNGLFYTDVKNANTIAWEMDKTVHVVEKTMNNNNILITRRTSEQKGALYDATLYKAKVAEKAKEGTYYPLKTTDSKIKDVGKYGGFTKIKIAYYSIFEYTLDGKKGKQKITRIVPIPIYISQNIKDDKALLEYAQTRLPGKDLKIKYRKLCIGSLVKINNFNYYIGGKTNNNFTFDSAVQVILDKDSESYIKELAKYLNWKKENKDGKLWESITEDKNIQLYDSLVKKMNTGIFIRKTPNKYTELLTLEVKNKFINIDIDEQVKLLLEILNLLTNKKFTSKLNEIGITASRGVCSFNLSNQSQFSIIEQSVTGVYEKEKLIIEKKKEGIL

SEQ ID NO: 188 - protein, 1029 aa, Alicycliphilus denitrificans
MRSLRYRLALDLGSTSLGWALFRLDACNRPTAVIKAGVRIFSDGRNPKDGSSLAVTRRAARAMRRRRDRLLKRKTRMQAKLVEHGFFPADAGKRKALEQLNPYALRAKGLQEALLPGEFARALFHINQRRGFKSNRKTDKKDNDSGVLKKAIGQLRQQMAEQGSRTVGEYLWTRLQQGQGVRARYREKPYTTEEGKKRIDKSYDLYIDRAMIEQEFDALWAAQAAFNPTLFHEAARADLKDTLLHQRPLRPVKPGRCTLLPEEERAPLALPSTQRFRIHQEVNHLRLLDENLREVALTLAQRDAVVTALETKAKLSFEQIRKLLKLSGSVQFNLEDAKRTELKGNATSAALARKELFGAAWSGFDEALQDEIVWQLVTEEGEGALIAWLQTHTGVDEARAQAIVDVSLPEGYGNLSRKALARIVPALRAAVITYDKAVQAAGFDHHSQLGFEYDASEVEDLVHPETGEIRSVFKQLPYYGKALQRHVAFGSGKPEDPDEKRYGKIANPTVHIGLNQVRMVVNALIRRYGRPTEVVIELARDLKQSREQKVEAQRRQADNQRRNARIRRSIAEVLGIGEERVRGSDIQKWICWEELSFDAADRRCPYSGVQISAAMLLSDEVEVEHILPFSKTLDDSLNNRTVAMRQANRIKRNRTPWDARAEFEAQGWSYEDILQRAERMPLRKRYRFAPDGYERWLGDDKDFLARALNDTRYLSRVAAEYLRLVCPGTRVIPGQLTALLRGKFGLNDVLGLDGEKNRNDHRHHAVDACVIGVTDQGLMQRFATASAQARGDGLTRLVDGMPMPWPTYRDHVERAVRHIWVSHRPDHGFEGAMMEETSYGIRKDGSIKQRRKADGSAGREISNLIRIHEATQPLRHGVSADGQPLAYKGYVGGSNYCIEITVNDKGKWEGEVISTFRAYGVVRAGGMGRLRNPHEGQNGRKLIMRLVIGDSVRLEVDGAERTMRIVKISGSNGQIFMAPIHEANVDARNTDKQDAFTYTSKYAGSLQKAKTRRVTISPIGEVRDPGFKG

SEQ ID NO: 189 - protein, 1422 aa, Sutterella wadsworthensis
MTQSERRFSCSIGIDMGAKYTGVFYALFDREELPTNLNSKAMTLVMPETGPRYVQAQRTAVRHRLRGQKRYTLARKLAFLVVDDMIKKQEKRLTDEEWKRGREALSGLLKRRGYSRPNADGEDLTPLENVRADVFAAHPAFSTYFSEVRSLAEQWEEFTANISNVEKFLGDPNIPADKEFIEFAVAEGLIDKTEKKAYQSALSTLRANANVLTGLRQMGHKPRSEYFKAIEADLKKDSRLAKINEAFGGAERLARLLGNLSNLQLRAERWYFNAPDIMKDRGWEPDRFKKTLVRAFKFFHPAKDQNKQHLELIKQIENSEDIIETLCTLDPNRTIPPYEDQNNRRPPLDQTLLLSPEKLTRQYGEIWKTWSARLTSAEPTLAPAAEILERSTDRKSRVAVNGHEPLPTLAYQLSYALQRAFDRSKALDPYALRALAAGSKSNKLTSARTALENCIGGQNVKTFLDCARRYYREADDAKVGLWFDNADGLLERSDLHPPMKKKILPLLVANILQTDETTGQKFLDEIWRKQIKGRETVASRCARIETVRKSFGGGFNIAYNTAQYREVNKLPRNAQDKELLTIRDRVAETADFIAANLGLSDEQKRKFANPFSLAQFYTLIETEVSGFSATTLAVHLENAWRMTIKDAVINGETVRAAQCSRLPAETARPFDGLVRRLVDRQAWEIAKRVSTDIQSKVDFSNGIVDVSIFVEENKFEFSASVADLKKNKRVKDKMLSEAEKLETRWLIKNERIKKASRGTCPYTGDRLAEGGEIDHILPRSLIKDARGIVFNAEPNLIYASSRGNQLKKNQRYSLSDLKANYRNEIFKTSNIAAITAEIEDVVTKLQQTHRLKFFDLLNEHEQDCVRHALFLDDGSEARDAVLELLATQRRTRVNGTQIWMIKNLANKIREELQNWCKTTNNRLHFQAAATNVSDAKNLRLKLAQNQPDFEKPDIQPIASHSIDALCSFAVGSADAERDQNGFDYLDGKTVLGLYPQSCEVIHLQAKPQEEKSHFDSVAIFKEGIYAEQFLPIFTLNEKIWIGYETLNAKGERCGAIEVSGKQPKELLEMLAPFFNKPVGDLSAHATYRILKKPAYEFLAKAALQPLSAEEKRLAALLDALRYCTSRKSLMSLFMAANGKSLKKREDVLKPKLFQLKVELKGEKSFKLNGSLTLPVKQDWLRICDSPELADAFGKPCSADELTSKLARIWKRPVMRDLAHAPVRREFSLPAIDNPSGGFRIRRTNLFGNELYQVHAINAKKYRGFASAGSNVDWSKGILFNELQHENLTECGGRFITSADVTPMSEWRKVVAEDNLSIWIAPGTEGRRYVRVETTFIQASHWFEQSVENWAITSPLSLPASFKVDKPAEFQKAVGTELSELLGQPRSEIFIENVGNAKHIRFWYIVVSSNKKMNESYNNVSKS

SEQ ID NO: 190 - protein, 1132 aa, Nitratifractor salsuginis
MKKILGVDLGITSFGYAILQETGKDLYRCLDNSVVMRNNPYDEKSGESSQSIRSTQKSMRRLIEKRKKRIRCVAQTMERYGILDYSETMKINDPKNNPIKNRWQLRAVDAWKRPLSPQELFAIFAHMAKHRGYKSIATEDLIYELELELGLNDPEKESEKKADERRQVYNALRHLEELRKKYGGETIAQTIHRAVEAGDLRSYRNHDDYEKMIRREDIEEEIEKVLLRQAELGALGLPEEQVSELIDELKACITDQEMPTIDESLFGKCTFYKDELAAPAYSYLYDLYRLYKKLADLNIDGYEVTQEDREKVIEWVEKKIAQGKNLKKITHKDLRKILGLAPEQKIFGVEDERIVKGKKEPRTFVPFFFLADIAKFKELFASIQKHPDALQIFRELAEILQRSKTPQEALDRLRALMAGKGIDTDDRELLELFKNKRSGTRELSHRYILEALPLFLEGYDEKEVQRILGFDDREDYSRYPKSLRHLHLREGNLFEKEENPINNHAVKSLASWALGLIADLSWRYGPFDEIILETTRDALPEKIRKEIDKAMREREKALDKIIGKYKKEFPSIDKRLARKIQLWERQKGLDLYSGKVINLSQLLDGSADIEHIVPQSLGGLSTDYNTIVTLKSVNAAKGNRLPGDWLAGNPDYRERIGMLSEKGLIDWKKRKNLLAQSLDEIYTENTHSKGIRATSYLEALVAQVLKRYYPFPDPELRKNGIGVRMIPGKVTSKTRSLLGIKSKSRETNFHHAEDALILSTLTRGWQNRLHRMLRDNYGKSEAELKELWKKYMPHIEGLTLADYIDEAFRRFMSKGEESLFYRDMFDTIRSISYWVDKKPLSASSHKETVYSSRHEVPTLRKNILEAFDSLNVIKDRHKLTTEEFMKRYDKEIRQKLWLHRIGNTNDESYRAVEERATQIAQILTRYQLMDAQNDKEIDEKFQQALKELITSPIEVTGKLLRKMRFVYDKLNAMQIDRGLVETDKNMLGIHISKGPNEKLIFRRMDVNNAHELQKERSGILCYLNEMLFIFNKKGLIHYGCLRSYLEKGQGSKYIALFNPRFPANPKAQPSKFTSDSKIKQVGIGSATGIIKAHLDLDGHVRSYEVFGTLPEGSIEWFKEESGYGRVEDDPHH

SEQ ID NO: 191 - protein, 1327 aa, Solobacterium moorei
MEGQMKNNGNNLQQGNYYLGLDVGTSSVGWAVTDTDYNVLKFRGKSMWGARLFDEASTAEERRTHRGNRRRLARRKYRLLLLEQLFEKEIRKIDDNFFVRLHESNLWADDKSKPSKFLLFNDTNFTDKDYLKKYPTIYHLRSDLIHNSTEHDIRLVFLALHHLIKYRGHFIYDNSANGDVKTLDEAVSDFEEYLNENDIEFNIENKKEFINVLSDKHLTKKEKKISLKKLYGDITDSENINISVLIEMLSGSSISLSNLFKDIEFDGKQNLSLDSDIEETLNDVVDILGDNIDLLIHAKEVYDIAVLTSSLGKHKYLCDAKVELFEKNKKDLMILKKYIKKNHPEDYKKIFSSPTEKKNYAAYSQTNSKNVCSQEEFCLFIKPYIRDMVKSENEDEVRIAKEVEDKSFLTKLKGTNNSVVPYQIHERELNQILKNIVAYLPFMNDEQEDISVVDKIKLIFKFKIPYYVGPLNTKSTRSWVYRSDEKIYPWNFSNVIDLDKTAHEFMNRLIGRCTYTNDPVLPMDSLLYSKYNVLNEINPIKVNGKAIPVEVKQAIYTDLFENSKKKVTRKSIYIYLLKNGYIEKEDIVSGIDIEIKSKLKSHHDFTQIVQENKCTPEEIERIIKGILVYSDDKSMLRRWLKNNIKGLSENDVKYLAKLNYKEWGRLSKTLLTDIYTINPEDGEACSILDIMWNTNATLMEILSNEKYQFKQNIENYKAENYDEKQNLHEELDDMYISPAARRSIWQALRIVDEIVDIKKSAPKKIFIEMAREKKSAMKKKRTESRKDTLLELYKSCKSQADGFYDEELFEKLSNESNSRLRRDQLYLYYTQMGRSMYTGKRIDFDKLINDKNTYDIDHIYPRSKIKDDSITNRVLVEKDINGEKTDIYPISEDIRQKMQPFWKILKEKGLINEEKYKRLTRNYELTDEELSSFVARQLVETQQSTKALATLLKKEYPSAKIVYSKAGNVSEFRNRKDKELPKFREINDLHHAKDAYLNIVVGNVYDTKFTEKFFNNIRNENYSLKRVFDFSVPGAWDAKGSTFNTIKKYMAKNNPIIAFAPYEVKGELFDQQIVPKGKGQFPIKQGKDIEKYGGYNKLSSAFLFAVEYKGKKARERSLETVYIKDVELYLQDPIKYCESVLGLKEPQIIKPKILMGSLFSINNKKLVVTGRSGKQYVCHHIYQLSINDEDSQYLKNIAKYLQEEPDGNIERQNILNITSVNNIKLFDVLCTKFNSNTYEIILNSLKNDVNEGREKFSELDILEQCNILLQLLKAFKCNRESSNLEKLNNKKQAGVIVIPHLFTKCSVFKVIHQSITGLFEKEMDLLK

SEQ ID NO: 192 - protein, 738 aa, Treponema phagedenis
MLQELFAKEIAKIDEGFFRRLDESAFYLEDKSLKQKYSLFNDDNFTDKDYYKKFPTIHHLIKALINDETHVDIRLLYLACHTIIKNRGHFLFEGKEFNTESRFDDAINELFSYLRQDMEIDFAFEDKIADIKEILENKKIGMRDKQNALNKKLSIAPKDKQKKEIIKLIVGASFNLKTLFNDEKYSSEKESYSFAKSNYEEKEAVLESLLGDGFGLILRAKAVYDSSVLSEILGNETYLSFAKVKIYDKHKEDLAKLKKVIKTYHADEFKKVFAEANIQGNYCSYVGSCKKNGKKVPIEKRADKDAFYDFLKKILKDEKAKNSDADYAFILNEIELKTFLPKQVSKKNANIPYQLRRMELEKIVNNAEKYFSFLSEKDEYGTVKEKIIQLLTFKRPYYIGIIQDTHKEKFPDRCWVVKKENAKNEKITPWNFYDHIDEDKTAEAFITSRTNKCTYLIGEDVLPRNSLLYMEYTVLNELNNLKVSVDGVNIFDVKLKKKIYEQVFKQRKEVSKKTIADFLKKEGICKKENDVVITGIDEKCTTSLKLYIDIKKIIGKRIEEEPTKNALEDIILWASIYDEGEGRKILEAKIQSVYPDVFTQDELNKILKLKISGWGRFSRKFLESIVASFPGFTDTINIITAMRETNFNLMELLGDAYGFSKGIEKFNSKFNDDKKVFSYDKLVKDLYLSPSVKRMLWRALVIVKEVKSIMGKDPKKYLLKWQEEKKLKREGLPPAMQV

SEQ ID NO: 193 - protein, 1377 aa, Streptococcus equinus
MEKTYSIGLDIGTNSVGWAVITDDYKVPAKKMKVLGNTDKKYIKKNLLGALLFDSGETAEATRLKRAARRRYTRRKNRLRYLQEIFAKEMAKVDESFFQRLEESFLTDDDKTFDSHPIFGNKAEEDTYHQEFPTIYHLRKHLADSPEKVDLRLVYLALAHMIKFRGHFLIEGQLNAENTDVQKIFADFVGVYDRTFDDSHLSEITVDAASILTEKISKSRRLENLIKQYPTEKKNTLFGNLVALALGLQPNFKTNFKLSEDAKLQFSKDTYDEDLEELLGKIGDDYADLFTAAKNLYDAILLSGILTVDDNSTKAPLSASMIKRYEEHHEDLEKLKTFIKVNNFDKYHEIFKDKSKNGYAGYIENGVKQDIFYKHLKSIISEKNGGQYFLDKIEREDFLRKQRTFDNGSIPYQIHLQEMRTILRRQGEYYPFLKENQAKIEKILTFRIPYYVGPLARKNSRFAWAKYHSDEPITPWNFDEVVDKEKSAEKFITRMTLNDLYLPEEKVLPKHSYVYETFAVYNELTKIKYVNEQGKSFFFDANMKQEIFDHVFKENRKVTKAKLLSYLNNEFEEFRINDLIGLDKDSKSFNASLGTYHDLKKILDKSFLDDKTNEQIIEDIVLTLTLFEDRDMIHERLQKYSDIFTSQQLKKLERRHYTGWGRLSYKLINGIRNKENNKTILDFLIDDGDANRNFMQLINDDSLSFKTTIQEAQVVGDVDDIEAVVHDLPGSPAIKKGILQSVKIVDELVKVMGHNPQNIVIEMARENQITGYGRNRSNQRLKRLQDSLKEFGSDILSKKKPSYVDSKVENSHLQNDRLFLYYIQNGKDMYTGEELDIDHLSDYDIDHIIPQAFIKDNSIDNRVLTSSAKNRGKSDDVPSIEIVRNRKSYWYKLYKSGLISKRKFDNLTKAERGGLTETDKAGFIKRQLVETRQITKHVAQILDARFNTKCDENDKVIRDVKVITLKSSLVSQFRKEFKFYKVREINDYHHAHDAYLNAVVGTALLKKYPKLAPEFVYGEYKKYDVRKLVAKSSDNHSELGKATAKYFFYSNLMNFFKTEVKYADGRVFERPDIETNADGEVVWNKQRDFNIVRKVLSYPQVNIVKKVEVQTGGFSKESILPKGDSDKLIPRKTKKLQWETQKYGGFDSPTVAYSVLVVADVEKGKTRKLKTVKELVGISIMERSSFEENPVSFLEKKGYHNVQEDKLIKLPKYSLFEFEGGRRRLLASATELQKGNEVVLPQYMVNLLYHSQHVNNSHKPEHLNYVKQHKDEFKDIFNLIISIARINILKPKVVDNLINEFTEYGQEDISSLSESFINLLKFISFGAPGAFKFLKLDVKQSNLRYKSTTEALSATLIHQSVTGLYETRIDLSKLGEE

SEQ ID NO: 194 - protein, 1128 aa, Streptococcus vestibularis
MSDLVLGLDIGIGSVGVGILNKVTGEIIHKNSRIFPAAQAENNVERRTNRQGRRLTRRKKHRRVRLNHLFEESGLITDFTKVSINLNPYQLRVKGLIDELSNEELFIALKNMVKHRGISYLDDASDDGNSSVGDYAQIVKENSKQLETKTPGQIQLERYQKYGQLRGDFTVEEDGKKHRLINVFPTSAYRSEALRILQTQKEFNPQITDEFINRYLEILTGKRKYYHGPGNEKSRTDYGRYTTKKDSENEYITLDNIFGILIGKCTFYPEEYRAAKASYTAQEFNLLNDLNNLTVPTETKKLSEEQKNQIINYVKNEKAMGPAKLFKYIAKLLSCDVADIKGYRIDKSDKAEIHTFEAYRKMKTLETIDFEKMSRDQLDKLAYVLTLNTEREGIQEALDHEFADGNFSQEQIDELVQFRKANSSIFGKGWHNFSVKLMMELIPELYATSEEQMTILTRLGKQKTTSSSNKTKYIDEKLLTEEIYNPVVAKSVRQAIKIVNAAIKEYGDFDNIVIEMARETNEDDEKKAIQKIQKANKDEKDAAMLKAANQYNGRAELPHSVFHGHKQLATKIRLWHQQGERCLYTGKTISIHDLINNPNQFEIDHILPLSITFDDSLANKVLVYATANQEKGQRTPYQALDSMDDAWSFRELKAFVRESKSLSNKKKEYLLTEEDISRFDVRKKFIERNLVDTRYASRVVLNALQEHFRAHKTDTKVSVVRGQFTSQLRRHWGIEKTRDTYHHHAVDALIIAASSQLNLWKKQKNTLVNYSENQLLDIETGELISDDEYKESVFKAPYQHFVDTLKSKEFEDSILFSYQVDSKFNRKISDATIYATRQAKVGKDKKDETYVLGKIKDIYSQTGYDAFIKIYQKDKSKFLMYRHDPQTFEKVIEPILENYPNKEMNEKGKEVPCNPFLKYKEEHGDYIRKYSKKGNGPEIKSLKYYDSKLGNHIDITPKDSNNKVVLQSVSPWRADVYFNKTTGKYEILGLKYADLQFEKGTGTYKISQEKYNVIKKKEGVDSDSEFKFTLYKNDLLLIKDTETKEQQLFRFLSRTKPNVKHYVELKPYDKQKFEGNESLINVLGAVAKGGQCQKGINKPNISIYKVRTDVLGNQHIIKNEGDKPKLDF

SEQ ID NO: 195 - protein, 1080 aa, Methylocystis sp.
MRVLGLDGGIASIGWALIEIFEDHEPSDGRIIDTGAWMFDAPEEKSQTGTKLKSELRRIFRGQRRVIRRRRQRMNEVRRILHRHGLLSSDNRDALKQPGLDPWKIRAEGIDRLLSPIEFAVALGHIARHRGFKSNSKGAKTSDLDAESSRMKKAVGETREKLARFGSPAKLLVEDEGFVLRQTKLKSGALETVRRFRNRDGDYSRSLLRDDLAAEVRALFRAQARLQSTFAKVELEAEFTQAAFFQRPLQDSERLVGPCPFEPAEKRSPKRGYSFELFRFLSRLNHLTLREGSEERTLTVEELRTAAADFGGVAKFTFSTLRKRLALPDIAIFVGIKADDEKKLDVVARSGEAATGTARLRRVVIDALGELAWGALISAPERLDKITEIITFRSDLDRIRAGLIEAGFDTPLIEAIVRAAADGKLDAFTGVGHISAKAARNIIPGLMRGMTYDKACAAAGYDHTASRERDAFDVGMHGKEALKKILQEERISRELVGSPSARKALIEAVKQVKAIIEKYGVPDRIHVELARDVGKSIEERRDIHFGIEKRSRQKDKLRELFGKEVGHLPQDGERGKEELLRFELWNEQMGRCLYTDEYINPKQLVASDNSVQVDHILPWSRFGDDSYLNKTLCTAKANQDKKGRTPYEWFRADKPEAEWDAFVARVESIQFMKGLKKRNYKLKNAEEAAEKFRSRNLNDTRWTCRLLAEALKQLYPKGEKDKDGKERRRVFTRPGALTNRLRRAWSLQRRKKSEKGERIADDRHHALDAIIVAATTESLLIRATREVQDIERKGLHYDLTKNITQPWPGFADEALDAVEKVFVARAERRRARGKAHDATIRHIAVRDDEAKVYERKKVGDIKLGDLIRVKDAERNAPLIENLRKWIEAGSPRDNPPLSPKGDPVSKVRLVTKNKVNITLDTGNPERLATVDRGEMARVDVFRKANRKGKYEYYLVPIYPHEIATMETPPMRAVQGGGDDDKWPEIDSTFEFLWSINQLSLLELTKPDGEVIRSYFRSLDRNTGALTVSGIANSTATRKGIGTRTLIDFKKLHVDRLGQIFEVERELRTWRGETWRGKDCI

SEQ ID NO: 196 - protein, 1087 aa, Phascolarctobacterium succinatutens
MLRMKYAIGLDIGIASVGYAVLALDHEENPWGIIRLGSRIFDVAENPKDGASLALPRREARSVRRRLRRHHHRLERIKNLLINTEFITKDELLHLYDGNLSDVYELRVKALDYSVTNAELTRILLHLAQRRGFKSNRKSDANDKEAGQLLEAVSANAKRMQENHYRTVGEMFYKDDLFSKYKRNKGGTYLTTVHRDMIAAEARTILEKQFALGNNICTQDFIDKYLSILLSQRQFDEGPGEPSPYAGNQIANMIGKCTFEPNEYRAAKASYSFERFNLLQKVNHLRLLLEGKSIALDNEQRKKIIALAHDKADLRYSHIRKALGLDEKVLFNTITYNDDVSVIEKKTKFNFLQAYHQIKKVLAEDMQKLTTEQLDNIGQILSTYKSDNKRTEELSALGLEKKIIDALLGINGLSKFAHLSLKALRKINPYLEEGKIYNEACTAAGYDFKAHANTQKTELLPAYKEEMDDITSPVARRAIAQSIKVINAIIREQKGSPLYINIELAREMAKGFDERTQIDKANKENQAKNERIMERIRTEFHKANPTGMDLIKLKLWEEQDGRSPYSQKAISINRLFEPGYVDIDHIVPYSISFDDSFKNKVLVFSDENRDKGNRLPIAYLQSKFGAKAAENFMIWVQSNIKDYKKRQKLLKREITEEDINKFKERNLQDTKTISRFLYNYINDYLLFAPSDTGKKKRVTAVNGTITAYLRKRWGINKIRANGDKHHAVDAVVIACTTDKMIKDLSSFSRYHELEYTHTDTESFLVNSLTGEILKRFPYPWEDFRPELMARLSDNPADALRKLNLIFYHGIDLSTIKPIFVSRMPRHKVTGAAHKATIKSARCLDNGIVICKTSLQNLKLDKEGEIANYYAPESDTILYNALKERLRSYDNKPAKAFAEPFYKPKADGTPGPLVKKVKVYEKSTLNVAVQQNTAVADNDSMVRVDVFHVKGNGYYLVPIYIADTLKKELPNKAIVAYKPYADWPVMDDSNFIFSLYPNDLIKFEHKNSVKFAKVNKESTLNDFYSTKSEIVYFKGCNINTGAITIINHENTYVVSSLGVKTLPSLEKYQADVLGNYTKVKKEVRKPFR

SEQ ID NO: 197 - protein, 1375 aa, Lactobacillus ruminis
MRKNQEPYNIGLDIGTSSIGWSIMNDNFDLMRVKGKKGIGVRLYNEGQSAAERRMHRTARRRYGRRKWRLRLLEDFFDEHMAEVDDTFFARLKDSNISPKDDKKYRKSLLFPKSKGVTYQDDGEFYKKYPTMYHLRYALMTEHRKFDLREIYLAFHHMVKYRGNFLYDTSVDSFEAKNLDIKGKFDEINDLLSSYTDFYVDNSNAALVESILLEKNTTRKDKSKKIAKLLHVEDKEKGKNKKAKDLATQISNAVLGLKCNFHLIFELQQKYSFDLCSEKTEENIAKLSEVLDENQKMLLMILKEVQDQVMLNAFVPSGMSLSEAMMQKYDDYGEQLKIYHELEHSVSDDSAAKLRGAYRDYNDNIIKRIDGDNKKDTFYKRVKNILTKISKEYVDQDVLESCGKLKKLIDENKLFIRQRTAANGVLPHQLHQIEMRKIIDNQKEYYPWLAEPNPNEKRRVYSKYKVEELIAFRIPYYVGPLVDPNNADKNKEARFSWMVRKKDGEITPWNFYDKVDWAESANNFIERMKSKDTYLLGEDVVPKESMLYQKYEVLNELNNLRINDSGLSDSFEDVKLKQAIYNDLFKKQKIVKITDLQNYLVQNHKYLVKPKISGLADENRFLSSLSTYSDLKTIFGDKVDDRTYFNDFEKMVEYSTVFEDGHDYNQKLDEYTWLTKEEKYKIGKKRYRGWGKLSKKLLTGLRDKNNHTIMDNLWETNRNFMQIQTADEFSKQIAEENERHLKGSVSDAINDMYTSPANKKAIRQVLRVVDDIQKAMGYAPSSISLEFAREDGPSVRTVSRANRMKSIYEKYASEVSEEVMKDLDGVIKDKKGLNDRLYLYFEQQGKDMYSGHPLDFDKVISGQEYDIDHILPQAVIKDDSLDNRVLTTKALNNDVKSKGVPCRMFNGMHSFWKNLYDKGFISRRKFNNLTTNPENIDKYKMKGFVNRQLVETRQIIKLVANVLNDKYQNDDVDIIEVRAELTHDVRKHFKFYKNRNVNDYHHAFDAYLTSFIGHYLFKKYPNLRPLFDYNDFMKVSDNVFKQLRGNNFLGEFLNKTGDIISTDGNFVLNKEEMINKLNKAYAFKKILVTKEVGQRTGAMFNETRYPAPNSRKAALKYRRMPKPDSLISVKDYKNTDIYGGYSGKNDAYMVIVDMGKQYMVVGVPVRYTEKLDKLRIKHSELYRDELRKVLSRDKTLLDSKGNVKRFDIVLDRVLYGQLIEDGNELFTLGSSKYKRNFRQLFLDKQCIEILDSSATPQPTDEELIWVYDQILDKVDKYFELYDINRQRETLRKGRAAFCSLPNISMKKDDVTKKKILNEILVALHANESESNCEKIGKKVFGRLQVPGGIKLSKEAKLIYQSPTGLFERVVYLKDL

SEQ ID NO: 198 - protein, 1391 aa, Prevotella oralis
MKKILGLDLGTTSIGWALVNEKENNEELSSIIRLGVRVNPLTVDEKSNFEKGKDITTNADRTKCRSARRNLQRFKLRREALADCLKRHGLMTDETPLCETNNSIIFKTYSNRAKAVCEKIALDDFVRVLFMINKKRGYKSSRKLNTDDEGTLVDGMDVAKLLYNEQITPGEYLLRLFKKGKKTRPDFYLSDLKAELERIWDFQRTFYPEILCNALKEDLKGKSRTQSSAIFYAKYKVSTAKIAGKDKRLQELTWRTDALRKQLTIDEVAYVICSINGEVNGSSQRLSMISDRSKLLYFNHQTIGQYLMQRLEENPNAGLKNIIFYRQDYEDEFNDIWNSQATYHKELTPELKKEVKDIIFYQRGLKSCKWLINYCELEHEEIEVKTPEGKLRKITIGSKTCPKSSPLFQEFKIWQVLNNLQVSPLNSRRKAKRKKDEEPSLFSDEDMNTACRYLNEEEKLTLFKELSIKKELKKKDALKLLFENYKELDLNYKVISGNVTMANLYRAFQDIISLTGNGEFDFQAMPAEEAEKTVEEIFGGLGYKTAFLHFDASLHDKEFERQPAYRLWHLLYSYAGDQSKTGIEALVKRIQELCGFEPEYARILANISFIPDYGNLSSKAMRKILPYMQDGYEYSEACSKAGYRHSASSLTKEEINKKNYKTHLDEIKRNSLRNPIVEKILNQMVNVVNSVIDTYSNIDEIRIEMARELKKSKPEREDMSFAISKATKETERIKGILEQEFKIQHVTRNDIIRYRLYEELKPNGYKTLYSNTYIPREDLFSKKFDIEHIIPKARLFDDSYSNKTLELRDINIEKGNQTAYDFVLSKYGEEGLYKYEQRVEEFKKNNEQAGTKCRKLLMREADIPSDFLNRDLNDSQYIAKKAHELLREIVPTVTATTGSITNRLREDWKLVNVMKELNWEKYDKLGLTEEYKDKDGNTVRHIKDWTKRNDHRHHAMDALTIAFTKPSFIQYLNNLNARSNRGGSIYGIEQKELERENNKLVFIPPIDPKIFRKQAKEHLSNILISIKAKNKVVTKNVNKTKSKSGTNRKVQLTPRGQLHLETVYGKIRTYKTEEIKVGTKLTEELIAKVADKKIREALMQRLSEYGGNIKKAFQNISKHPIWLNGSHTKHVPEKVKIVFFEDVFTIRKAITPDIKIDKVIDSKIRRILQERLNEFGGEASKAFSNLDENPIWFNRDKGIAIKSVKIRGIAKGTAIRVKKDIHGKTIIGNNGYPVANDYVNTGNNHHVAIFRDKDGNLQEHIVSFYEATARAIQNLPIVDRNYNSEKDWKFLFSMKQNEYFVFPNPNTGFNPSEISLKDEKNYALISPNLFRVQKLSHYYYVFRHHLETNVDTNLQLKDITWKRITAVNNLTGAVKVRIDHLGRIVDVGEYK

SEQ ID NO: 199 - protein, 1167 aa, Streptococcus sanguinis
MLFGLKTKFKDCFELEEEPDLNFSKENYDDNLEKLLGELGEDFSDVFDKLKILRDTILLSGMLTYTGATHARFSATMVERYEEHRKDLQRFKSFIKQNLSEQDYLDIFGRKTQNGFDVDKETKGYVGYITNKMVLTNPQKQKTIQQNFYDYISGKITGIEGSEYFLNKISDRTFLRKLRTSDNGAIPNQIHAYELEKIIERQGKDYPFLLENKDKLLSILTFKIPYYVGPLAKGNNSRFAWIKRANSSDILDDNDEDTRNGKIRPWNYHKLINMDETRDAFITNLIGNDTILLNEKVLPKRSLIYEEVMLQNELTRVKYKDKYGKAHFFDSEHRQNIINGLFKINSKRVNAERLIKYLSDNHKDLNAIEIVSGVEKGKSFNSTLKTYNDFKTIFSEEFLDSEIYQKELEEIIKVITVFDDKKSIKNYLTKYFGHLEFLDEEKINQLSKLRYTGWGRYSAKLLLDIRDEDTGFNLLQFLRNDEENRNLTNLISDNTLSFDPKIKAIQSKSTVEDDVFDEIKKLAGSPAIKRGILNSIKIVDELVQIIGYPPQNIVIEMARENMTTEEGQKKTKTRKSKLESALKNIENSVLENGKVLHSDEQLQSEKLYLYYLQNGKDIYSLDETGSPAPIYLDQLDQYEVDHIIPYSFLPIDSIDNKVLTHRKNNQRKLDNIPDKETVAHMKPFWEALYNAKLISQTKYQRLTTSERTPDGVLTESMKAGFIERQLVETRQIIKHVARILDNRFSDTKIITLKSQLVTNFRNTFHIAKIRELNDYHHAHDAYLAVVVGQTLLKAYPKLAPELIYGHHVHFNRHEENKATLRKHLYSNIMRFFNNPDSKVSKDIWDCNRDLPIIKHVIYNSQINFVKRTMIKKGAFYNQNPVGKFNKQLAANNRYPLKTKALCLDTSIYGGYGPMNSTLSIIIIAERFNEKKGKIETVKEFHDIFIIDYEKFNNNPFQFLNDTSENGFLKKNNINRVLGFYRIPKYSLMQKIDGTRMLFESKLNLHKATQFKLTKTQNELFFHMKRLLTNSNLMDLKSESAIKESQNFILKHKEEFDNISNQLSAFSQKMLGNTTSLKNLIKGYNERKIKEIDIREETIKYFYDNFIKMFSFVKSGAPKDINDFFDNKYTVARMRPKPDKRLLNATLIHQSITGLYETRIDLSKLGED

SEQ ID NO: 200 - protein, 1334 aa, Staphylococcus pseudintermedius
MGRKPYILSLDIGTGSVGYACMDKGFNVLKYHDKDALGVYLFDGALTAQERRQFRTSRRRKNRRIKRLGLLQELLAPLVQNPNFYQFQRQFAWKNDNMDFKNKSLSEVLSFLGYESKKYPTIYHLQEALLLKDEKFDPELIYMALYHLVKYRGHFLFDHLKIENLTNNDNMHDFVELIETYENLNNIKLNLDYEKTKVIYEILKDNEMTKNDRAKRVKNMEKKLEQFSIMLLGLKFNEGKLFNHADNAEELKGANQSHTFADNYEENLTPFLTVEQSEFIERANKIYLSLTLQDILKGKKSMAMSKVAAYDKFRNELKQVKDIVYKADSTRTQFKKIFVSSKKSLKQYDATPNDQTFSSLCLFDQYLIRPKKQYSLLIKELKKIIPQDSELYFEAENDTLLKVLNTTDNASIPMQINLYEAETILRNQQKYHAEITDEMIEKVLSLIQFRIPYYVGPLVNDHTASKFGWMERKSNESIKPWNFDEVVDRSKSATQFIRRMTNKCSYLINEDVLPKNSLLYQEMEVLNELNATQIRLQTDPKNRKYRMMPQIKLFAVEHIFKKYKTVSHSKFLEIMLNSNHRENFMNHGEKLSIFGTQDDKKFASKLSSYQDMTKIFGDIEGKRAQIEEIIQWITIFEDKKILVQKLKECYPELTSKQINQLKKLNYSGWGRLSEKLLTHAYQGHSIIELLRHSDENFMEILTNDVYGFQNFIKEENQVQSNKIQHQDIANLTTSPALKKGIWSTIKLVRELTSIFGEPEKIIMEFATEDQQKGKKQKSRKQLWDDNIKKNKLKSVDEYKYIIDVANKLNNEQLQQEKLWLYLSQNGKCMYSGQSIDLDALLSPNATKHYEVDHIFPRSFIKDDSIDNKVLVIKKMNQTKGDQVPLQFIQQPYERIAYWKSLNKAGLISDSKLHKLMKPEFTAMDKEGFIQRQLVETRQISVHVRDFLKEEYPNTKVIPMKAKMVSEFRKKFDIPKIRQMNDAHHAIDAYLNGVVYHGAQLAYPNVDLFDFNFKWEKVREKWKALGEFNTKQKSRELFFFKKLEKMEVSQGERLISKIKLDMNHFKINYSRKLANIPQQFYNQTAVSPKTAELKYESNKSNEVVYKGLTPYQTYVVAIKSVNKKGKEKMEYQMIDHYVFDFYKFQNGNEKELALYLAQRENKDEVLDAQIVYSLNKGDLLYINNHPCYFVSRKEVINAKQFELTVEQQLSLYNVMNNKETNVEKLLIEYDFIAEKVINEYHHYLNSKLKEKRVRTFFSESNQTHEDFIKALDELFKVVTASATRSDKIGSRKNSMTHRAFLGKGKDVKIAYTSISGLKTTKPKSLFKLAESRNEL

SEQ ID NO: 201 - protein, 1156 aa, Ruminococcus albus
MGNYYLGLDVGIGSIGWAVINIEKKRIEDFNVRIFKSGEIQEKNRNSRASQQCRRSRGLRRLYRRKSHRKLRLKNYLSIIGLTTSEKIDYYYETADNNVIQLRNKGLSEKLTPEEIAACLIHICNNRGYKDFYEVNVEDIEDPDERNEYKEEHDSIVLISNLMNEGGYCTPAEMICNCREFDEPNSVYRKFHNSAASKNHYLITRHMLVKEVDLILENQSKYYGILDDKTIAKIKDIIFAQRDFEIGPGKNERFRRFTGYLDSIGKCQFFKDQERGSRFTVIADIYAFVNVLSQYTYTNNRGESVFDTSFANDLINSALKNGSMDKRELKAIAKSYHIDISDKNSDTSLTKCFKYIKVVKPLFEKYGYDWDKLIENYTDTDNNVLNRIGIVLSQAQTPKRRREKLKALNIGLDDGLINELTKLKLSGTANVSYKYMQGSIEAFCEGDLYGKYQAKFNKEIPDIDENAKPQKLPPFKNEDDCEFFKNPVVFRSINETRKLINAIIDKYGYPAAVNIETADELNKTFEDRAIDTKRNNDNQKENDRIVKEIIECIKCDEVHARHLIEKYKLWEAQEGKCLYSGETITKEDMLRDKDKLFEVDHIVPYSLILDNTINNKALVYAEENQKKGQRTPLMYMNEAQAADYRVRVNTMFKSKKCSKKKYQYLMLPDLNDQELLGGWRSRNLNDTRYICKYLVNYLRKNLRFDRSYESSDEDDLKIRDHYRVFPVKSRFTSMFRRWWLNEKTWGRYDKAELKKLTYLDHAADAIIIANCRPEYVVLAGEKLKLNKMYHQAGKRITPEYEQSKKACIDNLYKLFRMDRRTAEKLLSGHGRLTPIIPNLSEEVDKRLWDKNIYEQFWKDDKDKKSCEELYRENVASLYKGDPKFASSLSMPVISLKPDHKYRGTITGEEAIRVKEIDGKLIKLKRKSISEITAESINSIYTDDKILIDSLKTIFEQADYKDVGDYLKKTNQHFFTTSSGKRVNKVTVIEKVPSRWLRKEIDDNNFSLLNDSSYYCIELYKDSKGDNNLQGIAMSDIVHDRKTKKLYLKPDFNYPDDYYTHVMYIFPGDYLRIKSTSKKSGEQLKFEGYFISVKNVNENSFRFISDNKPCAKDKRVSITKKDIVIKLAVDLMGKVQGENNGKGISCGEPLSLLKEKN

SEQ ID NO: 202 - protein, 1440 aa, Weeksella virosa
MKTILGLDLGTNSIGWALVEQDFENKQGLILGMGSRIIPMDAGIIGKFAEGSSISQTAERTGYRSIRRLRERHLLRRERLHRVLNILKFLPEHYAAEIDFEKRFGQFLAETEPKLAWKKNAEGKFEFLFQRSFDEMVADFKANGQDIKIPYDWTIYYLRKKALTQKISPQELAWIILNFNQKRGYYQLRGEEEEENPNKKVEFYSLKIVDVVADEQPNKKGDTWYSLHLENGWVYRRSSKIPLYDWKDKVRDFIVTTDINEDGSEKLDKDGEVKRSFRAPKEDDWTLIKKKTEQEIEQFNQTVGSYIYEALLDNPTQKIRGKLVRTIERKFYKSELKKILEKQIELQPELFTEDLYNACARELYRRNVAHQQQLSSRDFVYLFLNDIIFYQRPLRSQKSLISNCSLEFRTIKDKDGNGQIIYLKAIPKSNPYYQEFRVWQWLYNLKIFTKEDDKDVTNQFINKVEDLEALFEFLMNQKEVNHTDILTYLIEPIVKSKYPNAKGKAFKDELKKELKKYRWNYVYDADKDESKSYPMNETRYELRKRLDKVENVPADFMTRKIEQHLWHIIYSVTDKIEFEKALKSFANKYDLHQESFVENFKRFKPFDSDYGTYSEKAIKKLLPLMRVGKYWSWDIIDDKTKTRIGKIITGEYDETIKNRVREKAIDLTEENHFQGLQLWLAQYIVYDRHSEADIAGKWNSVADLEQYLSEFKQHSLRNPIVEQVITETLRVVRDIWKQYGKGAKDYFDEIHIELGREMKNTAEERKRLSSIISENETTNLRIRAILEELMYDENMENVRPYSPMQQEALKIYEDGVLSSSVEIPEDIEKISKKSEPTKSEIQRYKLWLEQKYRSPYTGRPIPLSKLFTPAYQIEHIIPQARFFDDGFSNKVICESEVNALKDKMLGLEFIQNYYGQKVTTSFGEVTILTEDAYKAFVKEHYDKNRSKRNKLLLEEIPEKMIDRQMNDTRYISKYISKVLSNLVRGEKDDEGVNSKNIIPGNGKITGILKQDWGLNDVWNDLILPRFERMNQLTNSTDFTAWNEKHQKFLPSVPLELSKGFQKKRIDHRHHALDALIIACATRDHVNLLNNKHAKSRNERYDLQHKLRHTTPWQDKEGKVRTKFTEFKKPWETFTQDTKKELEKIVVNFKQNLRVINKATNYYEKIVDGKKVMFKQEGVNWAIRKPMHKETVSGKIDLPRVKVSKGKILTATRKSLDTSFNAKTILSITDTGIQKILLNYLKAKGNPELAFSPEGIEEMNQNISLYNDGKPHQPILKVRVFEQGSKFPLGETGNKTTKYVEAAKGTNLFFGVYEDNQGKRSYDTIPLNIVIERQKQGLNSVPETNEKGHRLLFSLSPNDLVYVPIEGEVFDETNPDVNRIYKVVSFSGSQMFCVRQDVATSIVYKLEFSSLNKMERTIDGIMIKEICIKLKVDRLGNISKA

SEQ ID NO: 203 - protein, 1179 aa, Sphaerochaeta globus
MSKKVSRRYEEQAQEICQRLGSRPYSIGLDLGVGSIGVAVAAYDPIKKQPSDLVFVSSRIFIPSTGAAERRQKRGQRNSLRHRANRLKFLWKLLAERNLMLSYSEQDVPDPARLRFEDAVVRANPYELRLKGLNEQLTLSELGYALYHIANHRGSSSVRTFLDEEKSSDDKKLEEQQAMTEQLAKEKGISTFIEVLTAFNTNGLIGYRNSESVKSKGVPVPTRDIISNEIDVLLQTQKQFYQEILSDEYCDRIVSAILFENEKIVPEAGCCPYFPDEKKLPRCHFLNEERRLWEAINNARIKMPMQEGAAKRYQSASFSDEQRHILFHIARSGTDITPKLVQKEFPALKTSIIVLQGKEKAIQKIAGFRFRRLEEKSFWKRLSEEQKDDFFSAWTNTPDDKRLSKYLMKHLLLTENEVVDALKTVSLIGDYGPIGKTATQLLMKHLEDGLTYTEALERGMETGEFQELSVWEQQSLLPYYGQILTGSTQALMGKYWHSAFKEKRDSEGFFKPNTNSDEEKYGRIANPVVHQTLNELRKLMNELITILGAKPQEITVELARELKVGAEKREDIIKQQTKQEKEAVLAYSKYCEPNNLDKRYIERFRLLEDQAFVCPYCLEHISVADIAAGRADVDHIFPRDDTADNSYGNKVVAHRQCNDIKGKRTPYAAFSNTSAWGPIMHYLDETPGMWRKRRKFETNEEEYAKYLQSKGFVSRFESDNSYIAKAAKEYLRCLFNPNNVTAVGSLKGMETSILRKAWNLQGIDDLLGSRHWSKDADTSPTMRKNRDDNRHHGLDAIVALYCSRSLVQMINTMSEQGKRAVEIEAMIPIPGYASEPNLSFEAQRELFRKKILEFMDLHAFVSMKTDNDANGALLKDTVYSILGADTQGEDLVFVVKKKIKDIGVKIGDYEEVASAIRGRITDKQPKWYPMEMKDKIEQLQSKNEAALQKYKESLVQAAAVLEESNRKLIESGKKPIQLSEKTISKKALELVGGYYYLISNNKRTKTFVVKEPSNEVKGFAFDTGSNLCLDFYHDAQGKLCGEIIRKIQAMNPSYKPAYMKQGYSLYVRLYQGDVCELRASDLTEAESNLAKTTHVRLPNAKPGRTFVIIITFTEMGSGYQIYFSNLAKSKKGQDTSFTLTTIKNYDVRKVQLSSAGLVRYVSPLLVDKIEKDEVALCGE

SEQ ID NO: 204 - protein, 1370 aa, Streptococcus gallolyticus
MTKKNYSIGLDIGTNSVGWAVITDDYKVPAKKMKVLGNTDKKYIKKNLLGALLFDSGETAEATRLKRTARRRYTRRKNRLRYLQEIFAEEMTKVDESFFYRLDESFLTTDEKDFERHPIFGNKAEEDAYHQKFPTIYHLRNYLADSSEKADLRLVYLALAHMIKYRGHFLIEGKLNAENTDVQKLFTDFVGVYDRTFDDSHLSEITVDVASTLTEKISKSRRLENLIKYYPTEKKNTLFGNLIALALGLQPNFKMNFKLSEDAKLQFSKDTYEEDLEELLGKIGDDYADLFTSAKNLYDAILLSGILTVDDNSTKAPLSASMIKRYVEHHEDLEKLKEFIKANKSELYHDIFKDKNKNGYAGYIENGVKQDEFYKYLKNTLSKIDGSDYFLDKIEREDFLRKQRTFDNGSIPHQIHLQEMHAILRRQGDYYPFLKEKQDRIEKILTFRIPYYVGPLVRKDSRFAWAEYRSDEKITPWNFDKVIDKEKSAEKFITRMTLNDLYLPEEKVLPKHSHVYETYAVYNELTKIKYVNEQGKESFFDSNMKQEIFDHVFKENRKVTKEKLLNYLNKEFPEYRIKDLIGLDKENKSFNASLGTYHDLKKILDKAFLDDKVNEEVIEDIIKTLTLFEDKDMIHERLQKYSDIFTANQLKKLERRHYTGWGRLSYKLINGIRNKENNKTILDYLIDDGSANRNFMQLINDDTLPFKQIIQKSQVVGDVDDIEAVVHDLPGSPAIKKGILQSVKIVDELVKVMGDNPDNIVIEMARENQTTNRGRSQSQQRLKKLQSSLKELGSNILNEEKPSYIEDKVENSHLQNDQLFLYYIQNGKDMYTGDELDIDHLSDYDIDHIIPQAFIKDDSIDNRVLTSSAKNRGKSDDVPSLDIVRARKAEWVRLYKSGLISKRKFDNLTKAERGGLTEADKAGFIKRQLVETRQITKHVAQILDARFNTEHDENDKVIRDVKVITLKSNLVSQFRKDFEFYKVREINDYHHAHDAYLNAVVGTALLKKYPKLASEFVYGEYKKYDIRKFITNSSDKATAKYFFYSNLMNFFKTKVKYADGTVFERPIIETNADGEIAWNKQIDFEKVRKVLSYPQVNIVKKVETQTGGFSKESILPKGDSDKLIPRKTKKVYWDTKKYGGFDSPTVAYSVFVVADVEKGKAKKLKTVKELVGISIMERSFFEENPVEFLENKGYHNIREDKLIKLPKYSLFEFEGGRRRLLASASELQKGNEMVLPGYLVELLYHAHRADNFNSTEYLNYVSEHKKEFEKVLSCVEDFANLYVDVEKNLSKIRAVADSMDNFSIEEISNSFINLLTLTALGAPADFNFLGEKIPRKRYTSTKECLTATLIHQSITGLYETRIDLSKLGEE

SEQ ID NO: 205 - protein, 1044 aa, Nitrosomonas sp.
MLHKMRYRLALDLGSTSLGWAMVRLNANQQPCAVIKAGVRIFSNGRNPKDGSSLAVTRREARSMRRRRDRLLKRKARMMRTLIEYGFFPANETQRKALENLNPYALRAKGLDEALTPSEFARALFHINQRRGFKSNRKTDKKDSDSGALKTAIKQLHSVLDPQGNDGKPRTVGELLYKRFTDLSKLPKDRTVRARYRQDKIVKDDGKTKIDKYYDLYIDRAMIEQEFDALWKKQSELNPILFTENARADLKDVLLYQRSLKPVKPGRCTFMSEEERAPLALPSTQRFRMYQEVNNLRILREGLKEESLTLQQRDDLINALEKNNRRTFTQIKKLLGVGGSVQFNFEDPKREELKGNTTSAILGKSEHFGEAWFAFNEAKQDAIVLQLIKEENEAKLVRWLQDETGIDEKRAEVIANAGLPEGYGSLCIEALARILPELRRDVVTYDKAVQAAGFEHHSKLNRNEEIPDITFKIESIDRNSGEIKQFHLHKELPYYGEYLQRHVGFGSGKPEDSIEKRYGKIANPTVHIGLNQVRVVVNALIKRYGHPSEIIVEVARDLKQSKDRRDEENKRQAENQKRNERLRKDIADILGISEERVRRDDIEKMILWEELSFDPADRRCPYSGVQVSTVMLLSDEVEVEHILPFSQTLDDSLNNKTVALRQANRIKGNRTPWEAFGTSNISGFDYSGILTRAELMPKAKRYRFAEDGYQRWLKDDAGFLARALNDTRHLSKIAREYMSLICPNTRVIPGQMTAMLRRNFGLNDVLGLNGEKNRNDHRHHAVDACVIAVTDQGLLQRFAAASASARERQLNRLVENMPLPWESYREHVRRAIDGIWVSHRPDHSHEGAMHNDTAYGLRGNGRVSFHKMVEGKREYIEDNLKVIEITDTKAIDRHGLLPTGKPRPYKGYKGDSNYCIEIVRNEKGRWEGEIISTFDAYQLVRKYGIVQLRYPVLSVSGKPLVMRLIRNDFVRLEHEGITRTLRVCKMREDGQVALADVTEANVDARTRTKEICYVFKTGGSLQKAKARRITISPIGELRDPGFKE

SEQ ID NO: 206 - protein, 1045 aa, Acidovorax avenae
MQKEKPLAYRLALDLGSTSLGWAVLRLSAPGEPSAVIRAGSRIFSDGRNPKDGSSLAVTRRAARAMRRRRDRLLKRKARMLAALERHGFFPQDEAARKALEKLNPYGLRARGLESALKPEEFGRALFHLNQRRGFQSNRKTDRKDSDSGALKQAIGTLRAQMHESGCRTVGEWFWKVRMERKPEGVKGQGVRARYRETPFTTDEGKKRIDKRYDLYVDRAMVAQEFDALWAAQATFAPALFNEAARAELRDILLHQRKLRPVQPGRCTLVPEEPRALLALPSTQRFRIYQEVNHLRVLHDELREEALTLAQRDQIVALLERQAKVTFTAMRKALGFSALFNLEDAKRDGLKGNATTAALGKKDLFGPLWAGFDTALQDEIVTQLMTEESEPRLIAWLQEHTGVDEARAQAIANAGLPEGYGSLGRTALARIVPELQRDVITYDKAVQAAGFAHHSDLGFSFEHDADEVERIGERTIASTGEIKPVFAFKQLPYYGRALQRHVAFAKENPRNDEERYGKIANPTVHIGLNQVRVVVNALMCRYGRPTEVVIELARDLKQSREQKLEAQQRQADNQKRNARIRRSIAEVLGISEERVRTLDIQKWILWEELSHDAADRRCPYSGVQISASMLLGERVEIEHILPFSMTLDDSLNNRTVALREANRIKRNRTPWDARTDFEAHGWSYDGILQRAERMPQRKRHRFAPDGYERWLGEDKDFLARALNDTRYLSRVAAEYLRLVCPGSATRVIPGQMTALLRGKFGLNDVLGLDGEKNRNDHRHHAVDACVIGVTDQRMMQRFAQANAQAREDGLTRLVEDMPLPWPTYRAHVERAVRHIWVSHKPDHGFEGAMMEETSYGILRDGTIKQRRKADGSAGREISRLIRITEPSQPQRHGVDAEGRPLPYKGYVGGSNYCLEITVNDKGKWEGQVISTFDAYRIVREGGLRQLRHSTQGQNGQALAMRLVIGDSVRLEVDEQERVMRIVKINGNNGQVFMAPVHEANVDARNSDKNEAFAYTSKIAGSFQKTKARQVTISPIGELRDPGFKG

SEQ ID NO: 207 - protein, 1218 aa, Prevotella denticola
MKASEEKLSKGLSTYMKENNLLTVGAAFAQLEDEGVRIRNNNNYRAIRSQFQHEIETIFMFQQGLSENELYERLVSEKKNIGTIFYKRPLRSQRGNVGKCTLERTKPRCAIGHPLFEKFRAWTLINNIKIRMSEEEQAEQLPMKLRFELYNDCFLAFVRAEFKFEDIRKYLEKRLGVHFSYNDKTINYKDSTSVAGCPITARFRKLLGEDWESFHVDGQKQRQAHGKNNASFHTVSYSTNDIWHFCYDAEEPEAVLSFAQDNLKWEKKKAEELVRIWSAIPQGYAMLSQKAIRNINKMLILGLKYSDAVLLAKVPEIVEITDGEILSVTEDYHRVEAQVGYEKQINNIVNALIAKYKSASEEYRFADHNYEYQLDKSDEKDIIKQIESNIGTRKWSLLDADEQTDILQKVRDKYQNFFRSHERKFVESPKLGECFEEYLMKKFPMVEGEQWKKLYHPSQIAIYRPVSAGKDRSALRLGNPDIGAIKNPTVLRVLNTLRKRVNQLLDDGLISPDETRVVVETARELNDANRKWALDNYNRIRHDENEKIKKILEEFYPKRDGISTDDIDKARYVIDQREMDYFTEEKPYNKDIKKYKLWLEQGGQCMYTGRTINLSNLFDPNSFDVEHTIPESISFDSSDMNLTLCDAHYNRFIKKNHIPADLPNYDKSVVIDGKEYSPIKPRLQRWADRVERLNRNVEYWRGQARRAQNKDRKDQCMREMHLWKMELEYWTKKLERFTITEVTDEFKNSQLVDTRVITRHAVLYLKSIFPHVDVQRGDVTAKFRKILGIQSVDEKKDRSLHSHHAIDATTLTIIPGAAKRERMLELFAKIEEVNKMLSFSGNEDRTGLKQELDGLKNQLNKEVKACRIGHNVSEIGTFINDNIIINHHVKNQALTPVRRRLRKRGHIVGGMDNPRWQTGDALRGEIHKASYYGAITQFAKDKDGKVLLKEGHPLVDPTIKFVIRRELKYKKSTADSGFASWDDLEKAIVDKELFALMKGQFPEETSFKDACEQGIYMIKKGKNGEVDTKLYRIRHIRCKTKQKNALKIKEQAYKSEKEYKRYFYAAVGDLYAMCCYTNGKTREFKIYSLYDISCHRKVGVEDIPEFITDKKGNRLMLDYKLHTGDMILLYKENPEELYDLDNVSLSKLLYKINGFENDGLRIRMVNHLVAKEAMGESVKDYAKLPDIIRCGVKTIKFLVMGENRDFVIKNGKISFNHR

SEQ ID NO: 208 - protein, 1458 aa, Fluviicola taffensis
MTKTILGLDLGTNSIGWALINQDFDNKKGEILGMGSRIIPMTQDIKDEFGKGNSISQTAERTRLRGVRRLIHRTLLRRERLHRVLNIIGFLPEHYANQIDFEKRFGKFKPESEPKISFDGNDVFLFEKSYQEMLVDFKIHQPQLVSNGKKIPHDWTIYYLRKKALSKKIEKEELAWILLNFNQKRGYYQLRGEEEEETPNKLVEFHSLKIVEVNADEPQKGKPEIWYSLVLENGWVYRRASKTPLFDWKDKIREFIVTTEINNDGTVKTDKEGTEKRSFRAPKPEDWTLQKKKTEFELSKSGNEVGAFIYESILQKPNQKIRGKLISTIERKFYKEELKTILKTQLFFHKELKDEKLYNACIEELYKNNEAHRSLLSNKGFEHLFINDILFYQRPLRSKKSQISNCPLEKRTYKKEGIEITEGIKVISKSNPIYQEFRLWQWISNLSLYCIEPTETNVTSTFLNSIEDYENLFEFLNNRKEIEQKHLLKYLLENQGFKGKLLTNELEKFRWNFVADKKYPCNETGSLLHTRLSKVKNISPDFLTKEIEHQLWHIIYSVTDKIEYEQALKTFARKNNLDVDSFFEHFKKIPPFESTYGAYSEKAIKKLLPLIRLGKYWNWEAIDSISKDRISKILSGEYDENIKNRVREKAVHLTSENNFQGLQEWLAKYIVYDRHSEGNDLGKWTSVSDLETYLKEFKQHSLRNPIVEQVITETLRVVKDIWIKHGKGTENFFDEIHVELGREMKNNSEDRKRLTNTITENENTNLRIKALLMEMMNDNDVENVRPYSPSQQEILKIYEDGALNSNIELDDEIVKISKKAEPTKSELQRYKLWLEQKYRSPYTGQVIPLNKLFTSEYEIEHVVPQSRFFDDSFSNKVICESAVNKRKDNQLGLQFIKNHSGEKVELGFGKVVQVFTEEQYLDFVKEHYSKNRSKHNKLLLEEIPEKMIERQLNDTRYISKFVSSILSNIVRSEKDDDGLNSKNILPGNGKITTELKRDWGLNDVWNDLILPRFERMNTITNSDLFTTYNDKYQKHLPTVPFEYSKGFQKKRIDHRHHAMDALVIACATRDHLNLMNNQSAKSELKRYDLQNKLRKKEPYFNQKENKQKEAFKDFIKPWGTFTEDSKNALEKIIISFKQNLRVINKATNSYESYKDEDGNLRIGKDGKPEKGLIKQKGLNWAIRKPLHKDTVSGQINLSRIKLPNGKILTATRKNLDTSFDLKTIENSITDTGIQKILKNYLLSKESPELAFSPEGLEEMNNEIEKYNNGKFHHPINKARIYELGSKFNVGQTGNRRDKFVEAAKGTNLFFAIYQDENKNRSYETIPLNEVIEHQKWRASLPKEEQEKIPLVPVNKLKGTFIFSLSPNDLVYVPSNDELERSASIDFSKLKKEQINRLYKMVSSSGSQCFFVKSEVATSVVNKMEYSSLNKMEKSIDNLMVKEICIKLKIDRLGNISKA

SEQ ID NO: 209 - protein, 1384 aa, Coriobacterium glomerans
MKLRGIEDDYSIGLDMGTSSVGWAVTDERGTLAHFKRKPTWGSRLFREAQTAAVARMPRGQRRRYVRRRWRLDLLQKLFEQQMEQADPDFFIRLRQSRLLRDDRAEEHADYRWPLFNDCKFTERDYYQRFPTIYHVRSWLMETDEQADIRLIYLALHNIVKHRGNFLREGQSLSAKSARPDEALNHLRETLRVWSSERGFECSIADNGSILAMLTHPDLSPSDRRKKIAPLFDVKSDDAAADKKLGIALAGAVIGLKTEFKNIFGDFPCEDSSIYLSNDEAVDAVRSACPDDCAELFDRLCEVYSAYVLQGLLSYAPGQTISANMVEKYRRYGEDLALLKKLVKIYAPDQYRMFFSGATYPGTGIYDAAQARGYTKYNLGPKKSEYKPSESMQYDDFRKAVEKLFAKTDARADERYRMMMDRFDKQQFLRRLKTSDNGSIYHQLHLEELKAIVENQGRFYPFLKRDADKLVSLVSFRIPYYVGPLSTRNARTDQHGENRFAWSERKPGMQDEPIFPWNWESIIDRSKSAEKFILRMTGMCTYLQQEPVLPKSSLLYEEFCVLNELNGAHWSIDGDDEHRFDAADREGIIEELFRRKRTVSYGDVAGWMERERNQIGAHVCGGQGEKGFESKLGSYIFFCKDVFKVERLEQSDYPMIERIILWNTLFEDRKILSQRLKEEYGSRLSAEQIKTICKKRFTGWGRLSEKFLTGITVQVDEDSVSIMDVLREGCPVSGKRGRAMVMMEILRDEELGFQKKVDDFNRAFFAENAQALGVNELPGSPAVRRSLNQSIRIVDEIASIAGKAPANIFIEVTRDEDPKKKGRRTKRRYNDLKDALEAFKKEDPELWRELCETAPNDMDERLSLYFMQRGKCLYSGRAIDIHQLSNAGIYEVDHIIPRTYVKDDSLENKALVYREENQRKTDMLLIDPEIRRRMSGYWRMLHEAKLIGDKKFRNLLRSRIDDKALKGFIARQLVETGQMVKLVRSLLEARYPETNIISVKASISHDLRTAAELVKCREANDFHHAHDAFLACRVGLFIQKRHPCVYENPIGLSQVVRNYVRQQADIFKRCRTIPGSSGFIVNSFMTSGFDKETGEIFKDDWDAEAEVEGIRRSLNFRQCFISRMPFEDHGVFWDATIYSPRAKKTAALPLKQGLNPSRYGSFSREQFAYFFIYKARNPRKEQTLFEFAQVPVRLSAQIRQDENALERYARELAKDQGLEFIRIERSKILKNQLIEIDGDRLCITGKEEVRNACELAFAQDEMRVIRMLVSEKPVSRECVISLFNRILLHGDQASRRLSKQLKLALLSEAFSEASDNVQRNVVLGLIAIFNGSTNMVNLSDIGGSKFAGNVRIKYKKELASPKVNVHLIDQSVTGMFERRTKIGL

SEQ ID NO: 210 - protein, 1077 aa, Neisseria bacilliformis
MQQKPQRYILGLDLGIASVGWACVWADENEHPTGLLDCGVRTFERAEVPKTGDSLALARRQARSVRRLIRRRAHRLLRLRRLLKREGVLLSADFNENGLVRGLPIDAWALRVAGLDRKLSNKEWAAVLLHLVKHRGYLSQRKNETQSKDKELGRLLAGVNGNREALQNRSDEYRTAAELAVKKFAAENNGSLRNKGGDYSHTFDRKDLQRELHLLFERQRALDNPFTSSEMEAAVDELLMKQRSALQGEAVLKMLGRCTFEPSEYKAAKNTYSAERFVWLTKLNNLRIQYNGEERALSEAERRLLLDEPYQKAKLTYKQVRTILELPESAVFKGLRYGHGEDGLKAESGTLMEMKAYHAVRKALKDAGLEGEWENRIRNPELLDAIGTAFSLYKTDEDIRANLAAFRLSENVLEALLAGLNFDKFVHLSLKALAKILPLMEQGMRYDEACKEAYGDHYGAKEQEDHRLLPPFVADDIRNPVVFRTLTQARKIVNEIVRRYGSPLRVHIETGREVGKSFSDRKEIEKRQEENRKERERAAAHFKELFPNFAGEPKAQDILKLRLYEQQHGKCLYSGKEIDLRRLPEKGYVEIDHALPFSRTWDDSFNNKVLVLGKENQDKRNRTPYEYLDGKGNSGAWRAFAERVSGCRFPYAKKQRLLTQKLDEKTEQGFLERNLNDTRYVARFLCQFIEEKMHLEGAGKKRVFASNGQITALLRGFWGLKKVREENDRHHALDAVVVACSSVSMQQKITRHFRYREELEHIDRETGEVIHGFPQPWEFFRQEVMTRVFSDDPVSELAEKLDSRPEAVHEFVTPLFVSRAPHRKVTGQGHLETIRSAKRLDEKISVVKLPLTQLKTKDIERIVGYPNREPALYDALAARLAAFKDDPAKAFSEPFYKTGKDGKCGVLVKAVRVENVQKSGLLVRKDESGKMQGVADNATMVRVDVFGKNGKNYLVPVYAWQVEKGELPNRAVVAYADEEDWDEMDDSFEFKFSLYPNDLVEVVTKKDKFFGYYSGFNRATGAINIKEHDLSKSKVKNGVYEGIGVKTAQSFQKYQVDTLGKTIRLCKPEKRMGFKKK

SEQ ID NO: 211 - protein, 1029 aa, Alicycliphilus denitrificans; identical to SEQ ID NO: 188

SEQ ID NO: 212 - protein, 1122 aa, Streptococcus suis; identical to SEQ ID NO: 82

SEQ ID NO: 213 - protein, 1428 aa, Parasutterella excrementihominis
MGKTHIIGVGLDLGGTYTGTFITSHPSDEAEHRDHSSAFTVVNSEKLSFSSKSRTAVRHRVRSYKGFDLRRRLLLLVAEYQLLQKKQTLAPEERENLRIALSGYLKRRGYARTEAETDTSVLESLDPSVFSSAPSFTNFFNDSEPLNIQWEAIANSPETTKALNKELSGQKEADFKKYIKTSFPEYSAKEILANYVEGRRAILDASKYIANLQSLGHKHRSKYLSDILQDMKRDSRITRLSEAFGSTDNLWRIIGNISNLQERAVRWYFNDAKFEQGQEQLDAVKLKNVLVRALKYLRSDDKEWSASQKQIIQSLEQSGDVLDVLAGLDPDRTIPPYEDQNNRRPPEDQTLYLNPKALSSEYGEKWKSWANKFAGAYPLLTEDLTEILKNTDRKSRIKIRSDVLPDSDYRLAYILQRAFDRSIALDECSIRRTAEDFENGVVIKNEKLEDVLSGHQLEEFLEFANRYYQETAKAKNGLWFPENALLERADLHPPMKNKILNVIVGQALGVSPAEGTDFIEEIWNSKVKGRSTVRSICNAIENERKTYGPYFSEDYKFVKTALKEGKTEKELSKKFAAVIKVLKMVSEVVPFIGKELRLSDEAQSKFDNLYSLAQLYNLIETERNGFSKVSLAAHLENAWRMTMTDGSAQCCRLPADCVRPFDGFIRKAIDRNSWEVAKRIAEEVKKSVDFTNGTVKIPVAIEANSFNFTASLTDLKYIQLKEQKLKKKLEDIQRNEENQEKRWLSKEERIRADSHGICAYTGRPLDDVGEIDHIIPRSLTLKKSESIYNSEVNLIFVSAQGNQEKKNNIYLLSNLAKNYLAAVFGTSDLSQITNEIESTVLQLKAAGRLGYFDLLSEKERACARHALFLNSDSEARRAVIDVLGSRRKASVNGTQAWFVRSIFSKVRQALAAWTQETGNELIFDAISVPAADSSEMRKRFAEYRPEFRKPKVQPVASHSIDAMCIYLAACSDPFKTKRMGSQLAIYEPINFDNLFTGSCQVIQNTPRNFSDKTNIANSPIFKETIYAERFLDIIVSRGEIFIGYPSNMPFEEKPNRISIGGKDPFSILSVLGAYLDKAPSSEKEKLTIYRVVKNKAFELFSKVAGSKFTAEEDKAAKILEALHFVTVKQDVAATVSDLIKSKKELSKDSIENLAKQKGCLKKVEYSSKEFKFKGSLIIPAAVEWGKVLWNVFKENTAEELKDENALRKALEAAWPSSFGTRNLHSKAKRVFSLPVVATQSGAVRIRRKTAFGDFVYQSQDTNNLYSSFPVKNGKLDWSSPIIHPALQNRNLTAYGYRFVDHDRSISMSEFREVYNKDDLMRIELAQGTSSRRYLRVEMPGEKFLAWFGENSISLGSSFKFSVSEVFDNKIYTENAEFTKFLPKPREDNKHNGTIFFELVGPRVIFNYIVGGAASSLKEIFSEAGKERS

SEQ ID NO: 214 - protein, 1371 aa, Lactobacillus buchneri
MKVNNYHIGLDIGTSSIGWVAIGEDGKPLRIKGKTAIGARLFQEGNPAADRRMFRTTRRRLSRRKWRLKLLEEIFDPYITPVDSTFFARLKQSNLSPKDSRKEFKGSMLFPDLTDMQYHKDYPTIYHLRHALMTQDEKFDIRMVYLAIHHIVKYRGNFLNSTPVDSFKASKVNFVDQFKKLNELYTAINPEESFQINLANSEDIGHQFLDPSIRKFDKKKQIPKIVPVSVDDKATDKINGKIASEIINAILGYKSKLDVVVQCTPVDSKSWALKFDEEDIDAKLQKILPEMDENQQSIIAILQNLYSQVTLNQIVPNGMSLSESMIEKYNDHHDHLKLYKKIIDQLADPKKKAALKKAYSQYVGDDGKVIEQADFWSSVKKNLDDSDLSKQIMDLIDAEKFMPKQRTSQNGVIPHQLHQRELDEIIEHQSKYYPWLAEINPNKHDLHLAKYKIEELVAFRVPYYVGPMITPDDQAKSAETVFSWMERKGKEAGQITPWNFDEKVDRNASANRFIKRMTTKDTYLIGEDVLPDESLLYEKFKVLNELNMVRVNGKLLKVADKQAIFQDLFENYKHISVKKLQNYIKSKTGLPSDPEISGLSDPEYFNNSLGTYNDFKKLFGNKVDEPDLQDDFEKIVEWSTVFEDKRILREKLNEITWLSDQQKDVLESSRYQGWGRLSKKLLTGIVNDQGERIIDELWNTNKNFMQIQSDNDFAKRIHEANADQMKAVDVEDVLADAYTSPQNKKAIRQVVKVVDDIQKAMGGVAPKYISIEFTRSEDRNPRRTISRQRQLENTLKDTAKSLAKSINPELLSELDNAAKSKKGLTDRLYLYFTQLGKDIYTGKPINIDEISTYDIDHILPQAFVKDDSLNNRVLVSKAINNGKSDNVPVQLFGAKMGHFWKQLAEAGLISKRKLKNLQTDPDTISKYAMHGFIRRQLVETSQVIKLVANILGDKYRNDNTKIIEITARMNHQMRDEFGFIKNREINDYHHAFDAYLTAFLGRYLYHRYIKLRPYFVYGDFKKFKEDKVTMRNFNFLHDLTDDTQEKIADAETGEVIWDRENSIQQLKDVYHYKFMLISHEVYTLRGAMFNQTVYPASDAGKRKLIPIKADRPINVYGGYSGSADAYMAIVRIHNKKGDKYRVVGVPMRARDRLDAAKKVSDADCDRALKDVLTPQLTKTKKSRKTGEITQVVEDFEIVLGKVMYRQLMIDGDKKFMLGSSTYQYNAKQLVLSDQSVKTLASKGRLDPLQESMDYNNVYTEILDKVNQYFSLYDMNKFRHKLNLGFSKFISFPNHNVFDGNTKASSGKREILEEVLNGLHANPTFGNLKDIGITTPFGQLQQPNGILLSDEAKIRYQSPTGLFERTVSLKDL

SEQ ID NO: 215 - protein, 1090 aa, Sphingomonas sp.
MDWRLGLDLGANSLGWAALRLDRAGDPIGILAMGSRIFSDGRDPKSGASLAVDRRAARAMRRRRDRFKQRQAALLKYLIRDGLFPADQADRQRLADEDPYALRARALDEELSLFEIGRALFHLNQRRGFQSNRKADRGQDDEAGKIAVGVDRLNQQMEEQGARTLGEFLHQRRRAATDANHIPSVRTRLRPETGEGAKGDGYDFYPSRALIAEEFEEIWAAQAPHYPDTLTQQVHDRLYEIIFHQRPLRAPQVGQCTLVAGETRLPKAHPLFQKRRLLEEINALMIVRPGEIAQRLTPEERDTLYLKLKDKRTVSFATLRKTLKLDSAARFNKESENRTELKGDEVAAELGAKTRLGTRWQHLSGDQQWEVVHRLMALESQADEAAFRDWISQTYDLLPEQAAAVLGARLPQGHGRFGPTATTTLIDSLLHDRTEDGRVVVYSEAVQRSGLGHHSDLRHDRDDEDVTELPYYGVALERHIMPGTAEPTDPEEMRIGRLTNPTVHIGLNQLRHVVNRLIRAYGPPKEIAIELARELKLSEDEKKKRNSENRDNRLAAEGRSKKLEEIRQRDTGANRALLKLWEELNPGNVLDRRCIYTGEQISIDMLFSDRVEVDHILPFAQTLDDSNGNKLLCLREANREKRRRSPYEAWGHTDRWPDIAERASRLPKPKRWRFEPDAMQRFATEDGFLARHLVDTQYLGRLAREYLSWLYPGRGEGSGHVWVSPGRLTEMVRRKLGLNDLLPDHNFGGGADQPKNRLDHRHHAIDALVVAIVDRGMLQAIARASGQDGSEGRERIHIPAPWDGFRDDLRVAVNGIIVSHRPDHGTVAKAGLARGRDQTAGRLHNDTAYGLTGETDAKGNSIVVRRIPLSAIKKPADIARVRDPLLRNALAEFTKGLDGKAFEARIGRFHELGPLLYRGIRRVRVVETLTVIPIRDAEGRAYKGYKGDSNYRYDVWEMPDGKWRCQVVSMFDAHQSTEQARPHPAARKILSLQRNDILAIERTEGDRELVRVVKFSEKQFAVAPPHEGGSLKTRDGNADDPFRYLYPSPNTLKGWRARQVRIDELGRVLDPGFPARKSVRRTRPRAAPVD

SEQ ID NO: 216 - protein, 1000 aa, Kingella kingae
MARAQRRLISRRANRMNKLRRLLKQENVLQANDYDEKGLIIGLPNQAWELRAQGLDRKLEPKEWAAVLINLVKHRGYLSQRKNESQTADKELGALLSGMNHNHQLLQSQSNQYRTPAELAIKQFATQDGHIRNQRGAYTHTFNRLDLQNELNQLFDAQTRLGNPHVSGSLKTAINDLLMNQKAALSGDAILEMLGRCTFEPSEYKAAKNTYSAERFVWLGKLTNLRIQDNGLESALSREQRELLLNEPYNKTKLTYQQVRKLLRLPETAFFKGLRYGKDNAESATFMEMKSYHAIRKSLENKSLKSEWEKLKTQPKLLDLIGTAFSIYKTDDEIAGCLKNQLPENVIIALQEQLNFSNFMELSLKALEKLLPLMEQGLRYDEACTQIYGNRHEKIADKTEKFLPNIPADKLRNPVVLRTLTQARKVINAIIRRYGSPARVHIETGREVGKSFSDRDKLKKQQEENQEQRRRAIDEWKQFFPNAAHEPKAVDILKLRLYQLQQGKCLYSGLPIDVRRLPEKGYVEIDHALPFSRTWDDSFNNKILVLASENQNKGNQTPYEYLRGADNSESWRLFVENVQNCQFSPNKKQKIMAKQLDEKGFLERNLNDTRYVSRFLCQFISEHLHLTGKGKKRVFASNGQITALLRGRWGLSKNREENDRHHAVDAVVVACSTVAMQQKITQFVRYQKGNVFTGERIDKETGEVISIHFPTPWEHFREEVMIRVFDDNPLRTLPEKLPNRPEALHEYVMPLFVSRMPTRKMTGQGHKETIKSAKRLDEKISVLRVPLTQLKLNDLENMVNREREPALYEALKARLEQFKNDPAKAFAEPFFKQGGQQVKAVRVEIVQKSGMLLRKINGVADNGSMVRVDVFEKSGKFYLVPIYAWQVAEGILPNYAVVAHKDESDWILMDESYHFKFALYKNDLLEVQTKKGGIMGYFASLDRATGAITIREHDRDKKKCKDGEHRSIGVKMASSFKKLQVDELGKNIHETRSRKRPNIG

SEQ ID NO: 217 - protein, 1130 aa, Streptococcus pasteurianus
MTNGKILGLDIGIASVGVGIIEAKTGKVVHANSRLFSAANAENNAERRGFRGSRRLNRRKKHRVKRVRDLFEKYGIVTDFRNLNLNPYELRVKGLTEQLKNEELFAALRTISKRRGISYLDDAEDDSTGSTDYAKSIDENRRLLKNKTPGQIQLERLEKYGQLRGNFTVYDENGEAHRLINVFSTSDYEKEARKILETQADYNKKITAEFIDDYVEILTQKRKYYHGPGNEKSRTDYGRFRTDGTTLENIFGILIGKCNFYPDEYRASKASYTAQEYNFLNDLNNLKVSTETGKLSTEQKESLVEFAKNTATLGPAKLLKEIAKILDCKVDEIKGYREDDKGKPDLHTFEPYRKLKFNLESINIDDLSREVIDKLADILTLNTEREGIEDAIKRNLPNQFTEEQISEIIKVRKSQSTAFNKGWHSFSAKLMNELIPELYATSDEQMTILTRLEKFKVNKKSSKNTKTIDEKEVTDEIYNPVVAKSVRQTIKIINAAVKKYGDFDKIVIEMPRDKNADDEKKFIDKRNKENKKEKDDALKRAAYLYNSSDKLPDEVFHGNKQLETKIRLWYQQGERCLYSGKPISIQELVHNSNNFEIDHILPLSLSFDDSLANKVLVYAWTNQEKGQKTPYQVIDSMDAAWSFREMKDYVLKQKGLGKKKRDYLLTTENIDKIEVKKKFIERNLVDTRYASRVVLNSLQSALRELGKDTKVSVVRGQFTSQLRRKWKIDKSRETYHHHAVDALIIAASSQLKLWEKQDNPMFVDYGKNQVVDKQTGEILSVSDDEYKELVFQPPYQGFVNTISSKGFEDEILFSYQVDSKYNRKVSDATIYSTRKAKIGKDKKEETYVLGKIKDIYSQNGFDTFIKKYNKDKTQFLMYQKDSLTWENVIEVILRDYPTTKKSEDGKNDVKCNPFEEYRRENGLICKYSKKGKGTPIKSLKYYDKKLGNCIDITPEESRNKVILQSINPWRADVYFNPETLKYELMGLKYSDLSFEKGTGNYHISQEKYDAIKEKEGIGKKSEFKFTLYRNDLILIKDIASGEQEIYRFLSRTMPNVNHYVELKPYDKEKFDNVQELVEALGEADKVGRCIKGLNKPNISIYKVRTDVLGNKYFVKKKGDKPKLDFKNNKK

SEQ ID NO: 218 - protein, 1119 aa, Lactobacillus coryniformis
MGYRIGLDVGITSTGYAVLKTDKNGLPYKILTLDSVIYPRAENPQTGASLAEPRRIKRGLRRRTRRTKFRKQRTQQLFIHSGLLSKPEIEQILATPQAKYSVYELRVAGLDRRLTNSELFRVLYFFIGHRGFKSNRKAELNPENEADKKQMGQLLNSIEEIRKAIAEKGYRTVGELYLKDPKYNDHKRNKGYIDGYLSTPNRQMLVDEIKQILDKQRELGNEKLTDEFYATYLLGDENRAGIFQAQRDFDEGPGAGPYAGDQIKKMVGKDIFEPTEDRAAKATYTFQYFNLLQKMTSLNYQNTTGDTWHTLNGLDRQAIIDAVFAKAEKPTKTYKPTDFGELRKLLKLPDDARFNLVNYGSLQTQKEIETVEKKTRFVDFKAYHDLVKVLPEEMWQSRQLLDHIGTALTLYSSDKRRRRYFAEELNLPAELIEKLLPLNFSKFGHLSIKSMQNIIPYLEMGQVYSEATTNTGYDFRKKQISKDTIREEITNPVVRRAVTKTIKIVEQIIRRYGKPDGINIELARELGRNFKERGDIQKRQDKNRQTNDKIAAELTELGIPVNGQNIIRYKLHKEQNGVDPYTGDQIPFERAFSEGYEVDHIIPYSISWDDSYTNKVLTSAKCNREKGNRIPMVYLANNEQRLNALTNIADNIIRNSRKRQKLLKQKLSDEELKDWKQRNINDTRFITRVLYNYFRQAIEFNPELEKKQRVLPLNGEVTSKIRSRWGFLKVREDGDLHHAIDATVIAAITPKFIQQVTKYSQHQEVKNNQALWHDAEIKDAEYAAEAQRMDADLFNKIFNGFPLPWPEFLDELLARISDNPVEMMKSRSWNTYTPIEIAKLKPVFVVRLANHKISGPAHLDTIRSAKLFDEKGIVLSRVSITKLKINKKGQVATGDGIYDPENSNNGDKVVYSAIRQALEAHNGSGELAFPDGYLEYVDHGTKKLVRKVRVAKKVSLPVRLKNKAAADNGSMVRIDVFNTGKKFVFVPIYIKDTVEQVLPNKAIARGKSLWYQITESDQFCFSLYPGDMVHIESKTGIKPKYSNKENNTSVVPIKNFYGYFDGADIATASILVRAHDSSYTARSIGIAGLLKFEKYQVDYFGRYHKVHEKKRQLFVKRDE

SEQ ID NO: 219 - protein, 1126 aa, Lactobacillus farciminis
MADRISLGLDIGVASVGFSVLDIDKGKVIELGARLFSATVAAGNQDRRDMRGARRLLNRNKQRRQDTGKLFKKFGLIDDFDKGSFYDNFNQNLNPYELRVKGLTEQLTKEELAESLYQIVKHRGISYALKDADVDEGGTDYSVSLKINSQELAEKTPAQIQLQRLNDYGKVRGQVVIGDDPDNQKVLLNVFPTSAYEKEAKQIIATQQQFYPESLTDKFTEEYCQILTRKRDYFVGPGNEKSRTDYGIYKTDGRTLDNLFEELIGHDKIYPEELRASAASYTAQLFNVLNDLNNLRILNYEDGKLTKEDKEKIIAEIKNNTTTINMLNVIKKVAGCSKDDIKGFRVNEKDKPEISSMPVYRKIHKDLLKAGVDISDWPVEFIDELSFILTLNTENGEIRKQLNNRLAPKFDFLNADLIQLIIDNKDSFEIKTNNKWHRFSVKTMNKLIPEMMERPVEQMTLLNEMGLVKKDKKRFENNKYLPYKEIAKDIFNPVASKSVREALKIVNAVLKKYGHIDYLVVEMPRDKNLKEEQDNIKEFQNKNKKAKDAAFEAFVKSVGSEQRVKEALSKNRKLQMKMRLWYQQQEIDPYNGKTIDATDLINNPDKFEIDHIIPQSISFYDSINNKTLCFASMNQVKGQKTPYEFMLEGHGQSYDKFKATVMANKNFGKAKRANYLFEENVSDIETRKRFLSRNLVDTRYSSRVVLNSLQDFFREKSADTKVTVIRGKFTSNMRKHWHIDKTRETFHHHAIDASIIAATPFLRMWKKGGTIFPVKVGEESIDIETGEILDDKNFDKAMYEEPYSGFVSEIMNADDRIKFSHQVDKKMNRKVSDATIYSTRTGKLAKDKKDAEYIVAKVKDIYSVDGFKKFKKVYDKDKTKFLLYKYDPRTFSKLERIISDCPDKVEKVQTNGKVKAVDISPFEMYRRDHGMIKKYSKKGNGPAIKQLKYLDKKLGSHIDITPANANGKHVILQSLKPWRTDVYLNHETGEYEIMGIKYSDLKFNKNEGYGIKKDKYLEIKKVEEVSEKSEFMFSLYRKDRVKVQDMKTGESVELLFWSRNFSNKKYAELKPISQAENDKKLPVYGKGRLIKRLIPKNCKIWKVNTTILGDPYYLEKESDSPKDILD

SEQ ID NO: 220 - protein, 1380 aa, Eggerthella sp.
MNLRHVGNYNIGLDMGTASVGWAAIDEQGELLHFKGKPTWGSRLFDSANTAATARMPRGQRRRYIRRRWRLDLLQKFFSEEMAEKDPEFFIRLRQSSLWPEDREGGHTAYHWPLFNDSDFNEKEYYEKFPTIFHLRQWLMETDEKADIRLIYLAFHNIVKHRGNFLQENNDSLSAQNANMRESLESFCIALEEWCDEKELTCSCDPQKLEHLFKEVKYRSDIRDGFAALLGLACSGENEVDVKAMAKEMGKAIVGYKADFSKIFTECDKEGSSFRLSDDEGPEAFLDICPDDGIALFEAIQMVYSSFILTGMLTEKGLSLSKISAYNQYGQDLESLKALVKEYVPNEYSSFFRGPTYSGSTEYDPSKAQGYTRYNLGPSKKGSGAKPMAYEDFKKSVEQLFANTNAINDERYKEMMGRFAEEKFLRRLRTSDNGRIPFQLNLEEMTAIIINQGKYYPFLLEQQEKLESLVRFRIPYYVGPLTRINARLDSKGNACFAWSKRKDGMDSASIKPWNWDEVIDKHASAQAFIERMTGTCTYLRGEPVLPRCSLLYEEYCVLNELNGARWTQDGDKFIRFDYKDRSDIIEELFKKRRGRIQYAAVADWMKQERSHANVHVSGGQGENAFESRLSSYHFFCNDVFGVDELPGSYVDMVEEIILWSTLFEDRSILREEIQRKYGDVLNEEQIKTICKKRFSGWGRLSRKLLCSLKAQTDNGPKSIMDILQEGDQNNGRVGRAMVFQEILHDEQLGFEQKIEEENTQSMLEGENLLIEDLPGSPAIRRSINQAVRIVDEIVGIAGHAPDNIFIEVTREDDTKKKGKRTTTRYSNIQKALEALKEEGAEALRELKTYKHNELDKRLSLYFMQNGKSLYSGIPLDIRRLSEYQIDHIIPQSYIKDDSYENMALVLPGENQSKADNLLISQDIRIKMKATWTALHKAGLMGDKKYNNLMNSSISDAKMKGFINRQLVETSQSVKLTQMMLSQKYPGAKVRPIKASISSQLRDACDLVKCREANDYHHAHDAYLACQVGRFVLKRHSSMFDNPIGMTKVIRDFVKRQGQEFKRNGKLPAYASRSGFIVQSFMRSGFDAETGELLRDDWNAPFEIARIKRCLNYRDCYISRMPMEDSGAFWDATIYSPKAGKKGALPVKQGLPVEKYGSYSREQFAYFFVYKAYNPKKKAYRLEFEAVPVRVASAVETRENALEEYAKSVAKQAGLEFVEVARPKVYKYQLIELGEDRLYITGKREVRNASQLAFSLDEIDLLKRLAEGEETSSEERERLFDVLIEKYARYAPRLARQLSVDSMSATFETLNAEEQLGILLSLVEIANGKRNMIDLSSAGGSKNAGCMNPTFSSELSSPGSNFTFIDQSVTGMFERRQRLEL

SEQ ID NO: 221 - protein, 1430 aa, Capnocytophaga canimorsus
MKHILGLDLGTNSIGWAVVKEAQNDNEQSEIVDVGVRVNPLTTDEKTNFEKGKPISTNADRTLKRSARRNLQRYKLRRKELIELLKEHQLISTDTILTENGKGTTFQTLELRAKSAKEKISLEELARVFLTINKKRGYKSSRKAKNEDEGQLIDGMEIAKRLYEENLTTGQLSLQLLKEGKKSLPDYYRSDLQFELDKVWNFQKQFHSHILTDEFYAQLKGKGQRATSALFLAKYQIYTAENKGSREDKKLQAYQWRVDALSKELTREQLAFVITEINNNLNNSSGYLGAISDRSKELYFNNETVGEYLWKQIAANPHTSLKNQVFYRQDYLDEFEQIWKTQSAFYPEILTDELKKELRDVVIFYQRKLKSQKSLVSFCEFENKEIEIKKEDGTSTKKVIGLKVAPKSSPLFQEFKIWQNLNNVLIRKKGSKTKKVDKNQQAVLFEEEKTIFELDLEAKQALFNELNLKGNLKAYYCLEILGYSPKEWEMNYSVLEGNRTNKALYEAYLKITDLEGYDAKNHLKVKLNKDEVELDDLKVPASEIKDMVQAIFKEAGINTDILHFNAELDGKDFENQASYQLWHLLYSYEGDDSKSGNELLYKLLETKFGFKKEYAQILANVSLSDDYGSLSTKAMRKIHPYIKENKFSTACELAGYRHSKHSLTKEENDNRVLKDSLEVLKKNSLRQPVVEKILNQMINLVNALLKKYRTENPNFKFDEIRIELARELKKNAEERANMTVNINKAKTEHEKIIKILKNEFGLPNPTRNDIIRYRLYEELKANGYKDLYTNEYIEKQDLFTKNIDIEHIIPKSRVFDDSFSNKTLSFRKTNLDKGERTAFDYIESKFGADKLEEYVARVEDLYKNNIISKAKYQKLLKKESEIGDGFVERDLRETQYIAKKAKEILLQITPNVLSTSGGITDRLREDWDLINVMKELNLPKYRALGLTQMEDRKYGQQVEVIIDWTKRNDHRHHAMDALTVAFTKHNHIQYLNYLNARKNEKHREHSNIMGIQQLETIKVTDKNGNEKRVFKAPMPNFRQVTKAFLENVLISHKAKNKVVTKNKNKVAGSNKVQEVLTPRGQLHKETVYGKYQYYVQKEEKIGGKFDLETIKKVANPLYQSLLKKRLEENGGDPKKAFTGKNSLAKNPIYLDDAQTEQLPEKVKLVWLENSFSIRKDITPENFKDEKLIDKILDEGVKRILKERLQSFGNDAKKAFSDLDKNPIWLNKEKGIAIKRVAISGVANAEPLHTKKDHLGKEILDKEGKSIPVDFISTGNNHHVAVYRDEKGNLQEKVVSVFEAVVRANQGLPIIDKTYNQHLGWEFLFTMKQNEMFVFSNESTGFNPNDIDLLDPKNKKIISPNLFRVQKFSKLQYGNSFVREFVFRHHLETTVEDRKELQGITYKQMKNSAFFNDIIKVRINHLGGIVSVGEY

SEQ ID NO: 222 - protein, 1348 aa, Finegoldia magna
MKSEKKYYIGLDVGTNSVGWAVTDEFYNILRAKGKDLWGVRLFEKAKTAADTRTFRSGRRRNDRKGVRLQILREIFEDEIKKVDKDFYDRLDESKFWAEDKKVSGKYSLFNDKNFSDKQYFEKFPTIFHLRKYLMEEHGKVDIRYYFLAINQMMKRRGHFLIDGQISHVTDDKPLKQQLILLINDLLKIELEEEFMDSIFEILADVNEKKTEKKNILKELINAQDFNKQEGKILYSIFESIVTGKAKIKNIISDEDILEKIKEDNKEDFVLTGDSYEENLQYFEEVLQENITLFNTLKSAYDFVILQSILKGKSTLSDAQVERYDEHKKDLEILKKVIKKYDEDGKLFKQVFKEDNGNGYVSYIGYYLNKNKKITAKKKISNIEFTKYVKGILEKQCDCEDEDVKYLLGKIEQENFLLKQISSINSVIPHQIHLFELDKILENLAKYYPSFNNKKEEFTKIEKIRKTFTFRIPYYVGPLNDYHKNNGGNAWIFRNKGEKIRPWNFEKIVDLHKSEEEFIKRMLNQCTYLPEETVLPKSSILYSEYMVLNELNNLRINGKPIDTDVKLKLIEELFKKKTKVTLKSIRDYMIRNNFADKEDFDNSEKNLEIVSNMKSYIDFNNILGDKFELEMVEDLIEKITIHTGNKKLLKKYIEETYPDLSSSQIQKIINLKYKDWGRLSRKLLDGITGTNIETGEIDTVINFLRNSSDNLMQIIGSQNYSFNNDIDKLRKKYIPQEISYEVVENLYVSPSVKKMIWQVIRITEEITKVMGYDPDKIFIEMAKSEEGKKTTISRKNKLLALYKAIKKDERDSQYEKLLTGLNKLDDSDLRSRKLYLYYTQMGRDMYTGEKIDLDKLFDSTHYDKDHIIPQSMKKDDSIINNLVLVNKNANQTTKGNIYPVPSSIRNNPKIYNYWKYLMEKEFISKEKYNRLIRNTPLTNEELGGFINRQLVETRQSTKAIKELFEKFYKKSKIIPVKAILASDLRKDMNTLKSREVNDLHHAHDAFLNIVAGDVWNREFTSNPINYVKENREGDKVKYSLSKYFTRPRKSKGKVIWTPEKGRKLIVDTLNKPSVLISNESHVKKGELFNATIAGKKDYKKGKIYLPLKKDDRLQDVSKYGGYKAINGAFFFLVEHTKSKKRIRSIELFPLHLLSKFYEDKNTVLDYAINVLQLQDPKIIIDKINYRTEIIIDNFSYLISTKSNDGSITVKPNEQMYWRVDEISNLKKIENKYKKDAILTEEDRKIMESYIDKIYQQFKAGKYKNRRTTDTIIEKYEIIDLDTLDNKQLYQLLVAFISLSYKTSNNAVDFTVIGLGTECGKPRITNLPDNTYLVYKSITGIYEKRIRIK

SEQ ID NO: 223 - protein, 1352 aa, Megasphaera sp.
MKKRNREEYYVGLDIGTSSVGWAVATPDYRIPKFRGHKMWGSRLFAEGKRAAERRQFRTNRRRLARRRDRLQILEELFAEEMAKVDNTFFMRLKESKFFLEDKTVKEKHILFSTDKFDADRFYKDNPTIYHVRKRLMEEEPQDIRELFLAVHHILKYRGHFLFAGSLEQNGASIEELVRTLLGKQGLAILDDTIDSNEMVNILKNTGETKSDRKKDVQELWNPLKDKVKKAQAAEMAGLVLGLKSDISKLFANSDYKDLDSSIKNINFSSGDYEEKRDDYANSIGDDIVLLDTMKALYDTLILSQILQGKRSISAAKVEDYNTHKEQLRALKAILKPHKRLYNEMFRENNKKDLSNYVAYISSYSEGKRVNREGFYKYVQAVLKQVDDSDSKQAILEAIRLETFLPLLRVKDNAVIPHQIHQAELEAILETARKKYNFLNDVSDGVSVKDKIIQLFTFRIPYYVGPLNPHSGETVADRKQGTGWVVRKQRGKVYPWNFADMVDVKASAEAFITNLTNKCTYLIGEDVLPKRSLLYSEFMLLNELNMIKYDGHELPVAIKQLYIEQVFKQEHKKQTKGRVLDFLKRNGLITGSATAVITGMDDAIKGDLQSYRDMVRIFGAGFDHSMAERIIRWVTLFGEAKDILENKIREVYGNSISDSQMRAIKKLKYADWGRLSQAFLIAVKGCDKSGVERNIITCLRASSQNLMEILSDQGTYIKQIKAWNHQHTTNMMDTLDYQLVDDLYVAPSVKRSIWQSLCIVEELVKIMGQAPKKIFVEVTRTKQAEKTKKDSRKKRLVELYTAIGKEGAAWKKEIEAHQAGDFRRKKLYLYYTQMGRCMYSNEPIAMDALFTSAYDIDHIYPQSLTKDGSWDNLVLVKSQLNKEKSDQYPLRPAIREKNKAHWQYLCRAGFISEKKYERLMRTTELTAEELSGFIARQLVETSQATKAVTGLLERIYTNTEICFVKAETVSQFRHQHNFIKIRELNNYHHAKDAYLNIVVGNVYHEKFTKNPWEFIARSTERRPYNLNRMYDFDLLKQGRVIWQVPKSLETVQAMMKSNDVRITKKLLVQKGELYDATITKAHKAKEGTYFPLKGADARLRDVHRYGGYEKIKIAYYSVFSCREKASNTIHTLIIPIPVYKAGLLQTEADLTAYAWQTKQKTKPIKDIYSAITPIYKKLCINTVVKIDGFKYFLGGKTGDYMWLDPAIPVVLDEQAAAYLKAISKVGRADDVENTAQAIDLITAEANEAFYDVLLKKMEAKIFAKAYQTIVEKLASETARERFRELSIGAQCSCLLEILNLLANNKTTFTFFKDKMGVTMSRRKQPMDLTKLEECIVYETSITGLYEKAVSLL

SEQ ID NO: 224 - protein, 650 aa, Haemophilus pittmaniae
MENKNLHYILGLDLGIASVGWAVVEIDKEENPLCLIDVGVRTFERAEVPKTGESLALSRRLARSARRLTQRRVARLKKAKRLLKLENILLSTDERLPHQVWQLRVEGLDRKLKRQEWAAVLLHLIKHRGYLSQRKNESKSENKELGALLSGVASNHELLQQTTYRTPAELAVKKFEVEEGHIRNQQGAYTHTFSRLDLLAEMELLFSRQQHFGNPFASEKLLENLTALLMWQKPALSGEAILKMLGKCTFEDEYKAAKNTYTAERFVWITKLNNLRIQENGLERALNDNERLILIEQPYEKAKLTYAQVRSILNLSDEAIFKGLRYSGEDKKAIETKTTLMEMKAYHQIRKVLEGNNLKAEWTELKENSTLLDEIGTAFSLYKTDEDISTYLAGKLSQPVLNALLENLSFDKFIQLSLKALYKLLPLMQQGLRYDEACHEMYGDHYGKKTYGKKTEENHYFLPQIPADEIRNPVVLRTLTQARKVINGVVRLYGSPARIHIETGREVGKSYKDRRELEKRQEENRKQRENAIKEFKEYFPHFAGEPKAKDILKMRLYKQQNAKCLYSGKPIELHRLLEKGYVEVDHALPFSRTWDDSFNNKVLVLANENQNKGNLTPFEWLDGKHNSERWRAFKALVETSAFPYAKNNAS

SEQ ID NO: 225 - protein, 1062 aa, Ralstonia syzygii
MAEKQHRWGLDIGTNSIGWAVIALIEGRPAGLVATGSRIFSDGRNPKDGSSLAVERRGPRQMRRRRDRYLRRRDRFMQALINVGLMPGDAAARKALVTENPYVLRQRGLDQALTLPEFGRALFHLNQRRGFQSNRKTDRATAKESGKVKNAIAAFRAGMGNARTVGEALARRLEDGRPVRARMVGQGKDEHYELYIAREWIAQEFDALWASQQRFHAEVLADAARDRLRAILLFQRKLLPVPVGKCFLEPNQPRVAAALPSAQRFRLMQELNHLRVMTLADKRERPLSFQERNDLLAQLVARPKCGFDMLRKIVFGANKEAYRFTIESERRKELKGCDTAAKLAKVNALGTRWQALSLDEQDRLVCLLLDGENDAVLADALREHYGLTDAQIDTLLGLSFEDGHMRLGRSALLRVLDALESGRDEQGLPLSYDKAVVAAGYPAHTADLENGERDALPYYGELLWRYTQDAPTAKNDAERKFGKIANPTVHIGLNQLRKLVNALIQRYGKPAQIVVELARNLKAGLEEKERIKKQQTANLERNERIRQKLQDAGVPDNRENRLRMRLFEELGQGNGLGTPCIYSGRQISLQRLFSNDVQVDHILPFSKTLDDSFANKVLAQHDANRYKGNRGPFEAFGANRDGYAWDDIRARAAVLPRNKRNRFAETAMQDWLHNETDFLARQLTDTAYLSRVARQYLTAICSKDDVYVSPGRLTAMLRAKWGLNRVLDGVMEEQGRPAVKNRDDHRHHAIDAVVIGATDRAMLQQVATLAARAREQDAERLIGDMPTPWPNFLEDVRAAVARCVVSHKPDHGPEGGLHNDTAYGIVAGPFEDGRYRVRHRVSLFDLKPGDLSNVRCDAPLQAELEPIFEQDDARAREVALTALAERYRQRKVWLEELMSVLPIRPRGEDGKTLPDSAPYKAYKGDSNYCYELFINERGRWDGELISTFRANQAAYRRFRNDPARFRRYTAGGRPLLMRLCINDYIAVGTAAERTIFRVVKMSENKITLAEHFEGGTLKQRDADKDDPFKYLTKSPGALRDLGARRIFVDLIGRVLDPGIKGD

SEQ ID NO: 226 - protein, 1052 aa, Haemophilus parainfluenzae
MENKNLHYILGLDLGIASVGWAVVEIDEKENPLRLIDVGVRTFERAETQKGESLALSRRSARSARRLTQRRVARLKKAKRLLKSENILLSTDERLPHQVWQLRVEGLDRKLERQEWAAVLLHLIKHRGYLSQRKNESKSENKELGALLSGVASNHELLQQATYRTPAELAVKKFEVEEGHIRNQQGAYTHTFSRLDLLAEMELLFSRQQHFGNPFASEKLLENLTALLMWQKPALSGEDILKMLGKCTFEDEYKAAKNTYTAERFVWITKLNNLRIQENGLERALSDNERLMLIEQPYEKAKLTYAQVRSILNLSDDAIFKGVRYSGEDKKAIETKTTLMEMKAYHQIRKVLEGNNLKAEWVALKANPTLLDEIGTAFSLYKTDEDISAYLAGKLSQPVLNALLENLSFDKFIQLSLKALYKLLPLMQQGLRYDEACREIYGDHYGKKTEETHHFLPQIPADEIRNPVVLRTLTQARKVINGVVRLYGSPARIHIETGREVGKSYKDRHELKKRQEENRKQREKTISEIKTLFPNFSGEPKGKDILKMRLYYQQNAKCLYSGKPLELHRLFEQKYVEVDHALPLSRTWDDSFNNKVLVLANENQNKGNLTPFEWLDGKNNSERWRTFKALVETSAFPYAKKQRILSQKLDEKGFIERNLNDTRYVARFLCNFIADNMHLTGEGKRKVFASNGQITALLRRRWGLAKSREDNDRHHALDAVLVACSTVAMQQKITRFVRFKAGDVFTGERIDRETGEIIPLHFPTPWQFFKQEVEIRIFSDNPKLELENRLPDRPQANHEFVQPLFVSRMPTRKMTGQGHMETVKSAKRLNEGISMIKMPLTKLKLKDLELMVNREREKDLYDALKTRLEAFNDDPAKAFAEPFMKKGGAIVKSVRVEQVQKSGVLVRQGNGVADNASMVRVDVFTKDGKYFLVPIYTWQVAKGILPNKAVIQGKDEEDWEDIDDATFQFSLHPNDLISVKTKKDEFLGYFNGLNRHTGGINIRTHDLEKSKGKQGIFEGIGVKIALSFEKYQIDELGKNIRLCKPSKRQPVR

SEQ ID NO: 227 - protein, 1331 aa, Lactobacillus sanfranciscensis
MNKQPYNIGLDIGTSSVGWSATELDNRLLHIKGHNGIGVRLFKEGESAADRRGFRTTRRRLARRKWRLRLLNEIFATEIAKVDPSFFARLKQSNVSPKDPNKTMFENILFDDENLDDQKFHHDYKTIYHLRQAIINHPEQKFDIRLIYLAMHHIIKYRGHFLNQANVQDFKGGKIDLEKSFKALNDIFENQGRDLRLVTDKANQYVKVLSDNAKTRSDRKKELSKLLYVPIDKDTDKNSKKVTGEILKAILGNKAKFDVIFGIEVENPKEWVLTFNSDDFDDKIEGLSSQMTDEDSEILLILKELYFALNLSDILNNSVTDKNAKTLSEAMINRYDDHKNQLAMLKKVIDSSDKKHAKELKEAYSAYIDGENNKKISFEDLKKRIQKNLVDSELSQKINDLLDHDYFLPKQRSKENGAIPHQLQQQELDQIIESQKQYYPFLAELNPNEKRSRQAKYKLDELVAFRVPYYVGPMVEVTDSNQENNGKFAWMIRKEQGEITPWNFDEKVDRTETATKFITRMTTTDTYLIGEPVLPKNSLLYQKFVVLNELNNLKINQEIITPGQKQYLYEHVMKKNKRVTLKKIADALVIKGDYPYAPEVKGTTDQKNLNNGLTTYIDLAKIFGNELDDVDREADFEKIIEWSTIFEDQHIFALKLQELKWLTEKQRNQVVKLRYQGWGKLSKELLAGLVDDNGQRIIDLLWSDNQNFMQIVNQKSFKESIADHNGAHLEEKNLKDVINDLYTSPQNKKAIRQVILVVDDIINAVGYEPANIMMEFAREDSNDHRLTNSRSRQLENVYKDITNSWFDNDSVKDELEDKIKNKDKFTDRLYLYFTQGGKDLYTGEPLNIDDLSSYDIDHILPQSFILDNSLDNRVLTSQRNNRVSKEDQLPGELFGTKMHAFWKRLKAAHLISNKKYYNLTLTPNSISKFNNQGRFINRQLVETRQVIKLAAEILHNRYSEEKGTNIVTIKANLTHHMREKFNFYKNRNVNDYHHAFDAYLTAFVGNWLLQQYPKLKPYFVYGDFAKTEINNLKSFNMLYKFEQAHQLNEKDGKIAKDADALLGYMKNVYHFKKMLVTKKLETNHGALFKQTLYPSPAHDIKKRQLIKPKDNRPTDIYGGYTHEERKYMSLVKVIGKKDNEYRMANVPLLKINKNNDIKEILKSQFSNKKFEIVLPKVLKNQLFSENGALFVIGSKGYKYNANQLVLSDLDMKLLNDLSNNKSIDEVTINQLFKNIVDSTNKYMPLYEIKNLNEVVEKFNNLEFNDKKKTITDFLLATHANPTMSNLKNIGLPSYFGRFTSGNAGIKLSENANVIYQSPTGLFSRKVKISDF

SEQ ID NO: 228 - protein, 1473 aa, Flavobacterium branchiophilum
MAKILGLDLGTNSIGWAVVERENIDFSLIDKGVRIFSEGVKSEKGIESSRAAERTGYRSARKIKYRRKLRKYETLKVLSLNRMCPLSIEEVEEWKKSGFKDYPLNPEFLKWLSTDEESNVNPYFFRDRASKHKVSLFELGRAFYHIAQRRGFLSNRLDQSAEGILEEHCPKIEAIVEDLISIDEISTNITDYFFETGILDSNEKNGYAKDLDEGDKKLVSLYKSLLAILKKNESDFENCKSEIIERLNKKDVLGKVKGKIKDISQAMLDGNYKTLGQYFYSLYSKEKIRNQYTSREEHYLSEFITICKVQGIDQINEEEKINEKKFDGLAKDLYKAIFFQRPLKSQKGLIGKCSFEKSKSRCAISHPDFEEYRMWTYLNTIKIGTQSDKKLRFLTQDEKLKLVPKFYRKNDFNFDVLAKELIEKGSSFGFYKSSKKNDFFYWFNYKPTDTVAACQVAASLKNAIGEDWKTKSFKYQTINSNKEQVSRTVDYKDLWHLLTVATSDVYLYEFAIDKLGLDEKNAKAFSKTKLKKDFASLSLSAINKILPYLKEGLLYSHAVFVANIENIVDENIWKDEKQRDYIKTQISEIIENYTLEKSRFEIINGLLKEYKSENEDGKRVYYSKEAEQSFENDLKKKLVLFYKSNEIENKEQQETIFNELLPIFIQQLKDYEFIKIQRLDQKVLIFLKGKNETGQIFCTEEKGTAEEKEKKIKNRLKKLYHPSDIEKFKKKIIKDEFGNEKIVLGSPLTPSIKNPMAMRALHQLRKVLNALILEGQIDEKTIIHIEMARELNDANKRKGIQDYQNDNKKFREDAIKEIKKLYFEDCKKEVEPTEDDILRYQLWMEQNRSEIYEEGKNISICDIIGSNPAYDIEHTIPRSRSQDNSQMNKTLCSQRFNREVKKQSMPIELNNHLEILPRIAHWKEEADNLTREIEIISRSIKAAATKEIKDKKIRRRHYLTLKRDYLQGKYDRFIWEEPKVGFKNSQIPDTGIITKYAQAYLKSYFKKVESVKGGMVAEFRKIWGIQESFIDENGMKHYKVKDRSKHTHHTIDAITIACMTKEKYDVLAHAWTLEDQQNKKEARSIIEASKPWKTFKEDLLKIEEEILVSHYTPDNVKKQAKKIVRVRGKKQFVAEVERDVNGKAVPKKAASGKTIYKLDGEGKKLPRLQQGDTIRGSLHQDSIYGAIKNPLNTDEIKYVIRKDLESIKGSDVESIVDEVVKEKIKEAIANKVLLLSSNAQQKNKLVGTVWMNEEKRIAINKVRIYANSVKNPLHIKEHSLLSKSKHVHKQKVYGQNDENYAMAIYELDGKRDFELINIFNLAKLIKQGQGFYPLHKKKEIKGKIVFVPIEKRNKRDVVLKRGQQVVFYDKEVENPKDISEIVDFKGRIYIIEGLSIQRIVRPSGKVDEYGVIMLRYFKEARKADDIKQDNFKPDGVFKLGENKPTRKMNHNQFTAFVEGIDFKVLPSGKFEKI

SEQ ID NO: 229 - protein, 933 aa, Mycoplasma iowae
SVRDYSDGPGSEKSPTPYGLWRLNKEGKVEKIGENLWDVLVGKCTIYGNDDSIKDEKTKLRGGKNSPIAEVFNFINDLTNIYLFSSSKLKLNSKTKLSILDEFNISLKTSKPIKSFSEKKLVKHIISTTEFKDINFDDVYGYRIDTSKKPLFTKLENTITIAKWLLDNNVYNELNIYDQEDLIKINNIFVILQKSMDINKRAQLVSDEYKIDLPICLELVKKIKGVMQTHSFSYKAMLEYIPVGIKYNDLETGEDTSINASTYFVDKINNLNTKLLFNGRPRKYIPKNIFEDGIISPTSKRAFIQTINVLNKIIKVYSKDYDIDNIAIELPRDKNTAEERKKISSNQKKAGEEIAEVLKFAGLNVEEYTSKLNSKTKLKLKLLKEQNYKDIYDGQEIDVIDVIKNSNKYHEEHIIPYSLCFIDSRRNKVLTKFENNKQKGNKTPFQWLSSIGKYAEFKDRVEKLFVEQKISKAKKELLLFEQDPRTEMLGFIEKNLSDTRYASKLVFDTFRDFFKVNNPNVKIKVINGALTNYARYNLFATYKDGLLERKGIMKQREFYEHHGIDATILAFLGSNHKINQLLKLSHKFKKQDDNKIYDENTGELIEFTKDFLSDEARKKAMELSKQIFEIPCKFSRPIYRKSNVSFSNETLISMKWIDDKYTKGVKINKLSLVNKDLDLNEYFADYETNEMKNLICYQEDKTLYNKLKNIYDKYNNFVENSNIKPVKNPFINYMISNFSSDDSKIQNFKHIIFYDHKGNKKFVKSLKVCGDEKNLSNIVLRKDQKDIMNSKKIKKSGILESLNPISARIYKDNKGKYITIPINSLVLNWTKKGLEIDNEKLCNILKSKNIFNNQFIEINAGQSIINNENKLFYFVGGGDFKVNKLEIKSQFCDNEIFFPRKQMNISIATIIDNYKLCEVDELGKIYNIRKIVL

SEQ ID NO: 230 - protein, 1358 aa, Acidaminococcus intestini; identical to SEQ ID NO: 94

SEQ ID NO: 231 - protein, 983 aa, Campylobacter jejuni
MARILAFDIGISSIGWAFSENDELKDCGVRIFTKAENPKTGESLALPRRLARSARKRLARRKARLNHLKHLIANEFKLNYEDYQSFDESLAKAYKGSLISPYELRFRALNELLSKQDFARVILHIAKRRGYDDIKNSDDKEKGAILKAIKQNEEKLANYQSVGEYLYKEYFQKFKENSKEFTNVRNKKESYERCIAQSFLKDELKLIFKKQREFGFSFSKKFEEEVLSVAFYKRALKDFSHLVGNCSFFTDEKRAPKNSPLAFMFVALTRIINLLNNLKNTEGILYTKDDLNALLNEVLKNGTLTYKQTKKLLGLSDDYEFKGEKGTYFIEFKKYKEFIKALGEHNLSQDDLNEIAKDITLIKDEIKLKKALAKYDLNQNQIDSLSKLEFKDHLNISFKALKLVTPLMLEGKKYDEACNELNLKVAINEDKKDFLPAFNETYYKDEVTNPVVLRAIKEYRKVLNALLKKYGKVHKINIELAREVGKNHSQRAKIEKEQNENYKAKKDAELECEKLGLKINSKNILKLRLFKEQKEFCAYSGEKIKISDLQDEKMLEIDHIYPYSRSFDDSYMNKVLVFTKQNQEKLNQTPFEAFGNDSAKWQKIEVLAKNLPTKKQKRILDKNYKDKEQKNFKDRNLNDTRYIARLVLNYTKDYLDFLPLSDDENTKLNDTQKGSKVHVEAKSGMLTSALRHTWGFSAKDRNNHLHHAIDAVIIAYANNSIVKAFSDFKKEQESNSAELYAKKISELDYKNKRKFFEPFSGFRQKVLDKIDEIFVSKPERKKPSGALHEETFRKEEFYQSYGGKEGVLKALELGKIRKVNGKIVKNGDMFRVDIFKHKKTNKFYAVPIYTMDFALKVLPNKAVARSKKGEIKDWILMDENYEFCFSLYKDSLILIQTKDMQEPEFVYYNAFTSSTVSLIVSKHDNKFETLSKNQKILFKNANEKEVIAKSIGIQNLKVFEKYIVSALGEVTKAEFRQREDFKK

SEQ ID NO: 232 - protein, 1338 aa, Streptococcus macacae
MTKPYSIGLDIGTNSVGWAVVTDGYKVPAKKMKVLGNTDKSHIKKNLLGALLFDSGNTAKDRRLKRTARRRYTRRRNRILYLQEIFAEEMAKADESFFQRLNESFLTNDDKEFDSHPIFGNKAEEEAHHHKFPTIFHLRKHLADSTEKSDLRLIYLALAHMIKFRGHFLIEGQLKAENTNVQTLFDDFVEVYDKTVEESHLSEISVSSILTEKISKSRRLENLIKYYPTEKKNTLFGNLIALSLGLQPNFKTNFKLSEDAKLQFSKDTYEEDLGELLGKIGDNYADLFISAKNLYDAILLSGILTIDDNTTKAPLSASMIKRYEEHQEDLAQLKKFIRQNLPDQYSEVFSDKTKDGYAGYIDGKTNQEAFYKYIKNMLSKTEGADYFLDKIDREDFLRKQRTFDNGSVPHQIHLQEMHAILRRQGEYYPFLKENQDKIEKILTFRIPYYVGPLARKGSRFAWAEYKADKKVTPWNFDDILDKEKSAEEFITRMTLNDLYLPEEKVLPKHSLVYETFNVYNELTKVKYVNEQGKAIFFDANMKQEIFDHVFKENRKVTKDKLLNYLNKEFEEFRIVNLTGLDKENKAFNSSLGTYHDLRKILDKSFLDDKVNEKIIEDIIQTLTLFEDREMIRQRLQKYSDIFTTQQLKKLERRHYTGWGRLSAKLINGIRDKQSNKTILGYLIDDGYSNRNFMQLINDDSLPFKEEIARAQVIGETDDLNQLVSDIAGSPAIKKGILQSLKIVDELVKVMGHNPANIVIEMARENQTTAKGRRSSQQRYKRLEEAIKNLDHDLNHKILKEHPTDNQALQNDRLFLYYLQNGRDMYTEDPLDINRLSDYDIDHIIPQSFIKDDSIDNKVLVSSAKNRGKSDNVPSEDVVNRMRPFWNKLLSCGLISQRKYSNLTKKELKPDDKAGFIKRQLVETRQITKHVAQILDARFNTKRDENKKVIRDVKIITLKSNLVSQFRKDFKFYKVREINDYHHAHDAYLNAVIGKALLDVYPQLEPEFVYGEYPHFHGYKENKATAKKFFYSNIMNFFKKDDIRTDENGEIVWKKDEHISNIKRVLSYPQVNIVKKVEIQTVGQNGGLFDDNPKSPLEVTPSKLVPLKKELNPKKYGGYQKPTTAYPVLLITDTKQLIPISVMNKKQFEQNPVKFLRDRGYQQVGKNDFIKLPKYTLVDIGDGIKRLWASSKEIHKGNQLVVSKKSQILLYHAHHLDSDLSNDYLQNHNQQFDVLFNEIISFSKKCKLGKEHIQKIENVYSNKKNSASIEELAESFIKLLGFTQLGATSPFNFLGVKLNQKQYKGKKDYILPCTEGTLIRQSITGLYETRVDLSKIGED

SEQ ID NO: 233 - protein, 1265 aa, Mycoplasma ovipneumoniae
MHNKKNITIGFDLGIASIGWAIIDSTTSKILDWGTRTFEERKTANERRAFRSTRRNIRRKAYRNQRFINLILKYKDLFELKNISDIQRANKKDTENYEKIISFFTEIYKKCAAKHSNILEVKVKALDSKIEKLDLIWILHDYLENRGFFYDLEEENVADKYEGIEHPSILLYDFFKKNGFFKSNSSIPKDLGGYSFSNLQWVNEIKKLFEVQEINPEFSEKFLNLFTSVRDYAKGPGSEHSASEYGIFQKDEKGKVFKKYDNIWDKTIGKCSFFVEENRSPVNYPSYEIFNLLNQLINLSTDLKTTNKKIWQLSSNDRNELLDELLKVKEKAKIISISLKKNEIKKIILKDFGFEKSDIDDQDTIEGRKIIKEEPTTKLEVTKHLLATIYSHSSDSNWININNILEFLPYLDAICIILDREKSRGQDEVLKKLTEKNIFEVLKIDREKQLDFVKSIFSNTKFNFKKIGNFSLKAIREFLPKMFEQNKNSEYLKWKDEEIRRKWEEQKSKLGKTDKKTKYLNPRIFQDEIISPGTKNTFEQAVLVLNQIIKKYSKENIIDAIIIESPREKNDKKTIEEIKKRNKKGKGKTLEKLFQILNLENKGYKLSDLETKPAKLLDRLRFYHQQDGIDLYTLDKINIDQLINGSQKYEIEHIIPYSMSYDNSQANKILTEKAENLKKGKLIASEYIKRNGDEFYNKYYEKAKELFINKYKKNKKLDSYVDLDEDSAKNRFRFLTLQDYDEFQVEFLARNLNDTRYSTKLFYHALVEHFENNEFFTYIDENSSKHKVKISTIKGHVTKYFRAKPVQKNNGPNENLNNNKPEKIEKNRENNEHHAVDAAIVAIIGNKNPQIANLLTLADNKTDKKFLLHDENYKENIETGELVKIPKFEVDKLAKVEDLKKIIQEKYEEAKKHTAIKFSRKTRTILNGGLSDETLYGFKYDEKEDKYFKIIKKKLVTSKNEELKKYFENPFGKKADGKSEYTVLMAQSHLSEFNKLKEIFEKYNGFSNKTGNAFVEYMNDLALKEPTLKAEIESAKSVEKLLYYNFKPSDQFTYHDNINNKSFKRFYKNIRIIEYKSIPIKFKILSKHDGGKSFKDTLFSLYSLVYKVYENGKESYKSIPVTSQMRNFGIDEFDFLDENLYNKEKLDIYKSDFAKPIPVNCKPVFVLKKGSILKKKSLDIDDFKETKETEEGNYYFISTISKRFNRDTAYGLKPLKLSVVKPVAEPSTNPIFKEYIPIHLDELGNEYPVKIKEHTDDEKLMCTIK

SEQ ID NO: 234 - protein, 1535 aa, Flavobacterium columnare
MTKILGLDLGTNSIGWAIRDTENEGINQILDKGARIFSEGVKSENGKEISRAAERTAYRSARKIKYRRKLRKYETLKVLSINGMCPLSVEEVEQWKKSGFKEYPLNPEFLDWLRTNEDKNINPYLFRDKASKQKVTLFELGRALYHIAQRRGFLSNRLDQSAEGVFEEHNPQIQNLIEDLDSSNTILNELKEYYINLGIIDETEKSGFKKDLDEGEKKLKSLYNSLVAITKKNANDIETCKQELIARLNKKEDLGKVKGKIKDISQAMLDRNFKTLGQYFFSLYNKERIRNQYTSREEHYLEEFIIICQTQGIEGINTNEKLPEKKFTGLAKDLYRAIFFQRPLKSQKGLIGKCSFEKNKSRCAVSHPDYEEFRMWSYLNTIKIGTQSEKTLRFLTLEEKLKLVPKFYRKSDFNFEVLAKELVEKGASFGYYKSSKKNEFFYWFNYKPTDSVSACVVSASLENAIGKDWKIKTFEYQTRNTEKNEVTKSVDYKDLWHLLSVATSDTYLYDFAIEKLKLEPKNAKAFSKTKLKKDFASLSLAAIAKILPYLKQGLLYSHAVFMANIENIVDADIWKDEEQQKFIQSKIVELVDNYIVEKSKLELINGLLKIYNTEDKEGRKVYYSKEAESLFEADLRKKLVPFYKANIIIEEHEQEIIFQDLFPILMDQLKKQEFIKIGRLDKQIEAFLEGENEEGQIFCNHTDKLKKLYHPSDIEVFKKKTIKDEWGNEKVVLGSPLTTSIKNPMAMRALHQLRKVLNTLIANDQIDEDTRIHIEMARELNDANKRKGIQDFQNENKKFREEAIKEIKKLYLEECHKDVNPTEDDILRYQLWLEQGKCEIYEEGNNISICDIIGSNPSYDIEHTIPRSISQDNSQMNKTLCSLKFNRSIKKQKMPVELSNYNDILPRIAHWKKEAEELTRQIETISRSIKSAATKVAKDKNIRKRHYLTLKRDYILGKYERFTWEEPKVGFKNSQIPDTGIITKYAQAYLKSYFKRVESVKGGAVAEFRKLWGIQESFIDENWWKHYKDKDRDKHTHHTIDAITIACMPKDKYDLLAHAWRLEDEQDKKAAKVLIEQAKPWKTFKEDIEKIETEILVSHFTPDNVKKQSKSIIKNRGKKVYVLKNELPVNFKNKIEGKDYFKLKFDSKILYKIPKKKEKQTDTFYEELPKNYLNGVEGKDYFKINTTGKTFYKIPIFNQGDTIRGSLHQETTYGAIKLPDIDIETKKPLHTDKGGFILKKDIKGNEIVFFVVRKEISKISENDVQNIVDNVVRKKIENAIANSLITFKIVKKKKVAVIKEGVTIWMREPNIEKGIEGIPIKKVRIITNSVKNPIEIKVHSPLSKSRHKHKQKVYGQNDENYAMALYELDGKREFELINNFNLAKLLKQSQSYYPLHKEKEIKGKKILVPIEKRNNKDVILKRGQQVVFYDKTVENPKDISEIIDFRERIYIIEGLTIQRQKDKKTSKVNEYGIIQLRHFKEARKSEEISKDNFKPDGEFKINENKPTRKMNHNQFTAFVEGIDFKVLPSGKFQKI

SEQ ID NO: 235 - protein, 1459 aa, Flavobacterium columnare
MKFNLGLDIGTNSIGWALVNEDYENKKGKIIAAGSRIIPMTQDILDKFGSGAITETQTALRTDYRSKRKLIQRFLLRRERLHRVLNVLDFLPKHYAESIDFEKYFGKFLPNTEPKLAYNQNQFIFQNSFLEMLKEFQEKHPELLTNNKKIPYDWTIYYLRKKALNQRIEKEELAWLLLQFNQKRGYNQLRDEEEESVPNKQVEFYSLKIIDVVADQPKEGRDKRWYSINLENGWTYRRESKTPLFNWEGKTKDFIVTTDLNQDGSIKKDKEGKEKRSFRAPSEGDWTLLKKKTEKEIYESGKTLGTYIYDALLNTPDLKIKGDFIRTIDRSIYKEELQQIINKQKEYHLELNSSKLYKACLEELYPKNEIYKSALKNKDIAYLFINDILYYQRPLKAPKYNIGKCTYESRTFKKEDKKIREYIPAVAKSHPLFQEFRLWQWIKNLKIYEKLSSDNCTDFFLTNEQDFENLFEFLWNKKEIDHKGILEYLVKTKFPDLKPKQVKTKVKEYRWNYVYDHEKDESKTYPCGETYFLLKNKLDKIYNAQDDFLDKERLYNLWHIIYSVTDKKQYEKALAKFALKNHLDTKSFVNTFKRIPPFKNDYAIYSLKAIKKLLPLMRVGKYWNYDDIDPITKQKIQCIITGEENDTISTLVREKTNHFSNENDFKNLPLWLAGYIVYNSHNESSEIEKWKSPQDIDTFLKKFKQHALRNPIVEQVVTETLRVVRDIWSKKGQGKKDFFNEIHIELGKDLKNPVDKRRKLSSTNTKNESTNTRIKALLIELFTQGVENVKPNSPKHQEILKIFEEGALNSGIEIEEDIIKISNTDQPTKKQLELYILWLEHKYKSPYTGQSIPLSKLFTPNYEIEHIIPRSKYYDDNLSNKVICETEINRLKNNQLGYEFINNHEIREVTLEEGKTIRLLSPEQYWNFVTTYYAKNKAKRENLLLKELPVQMVEKQLNDTRYVSKYVMQLLSKIVRKEDGTDNGINSTNILSISGKMTRALKNDWDLNDVWNDLLLYRFERLNTITKTNLFTTYSEQKQKRMPIVPDQYAKGFHKKRLDHRHHALDAIVIACITRNHINYMNNQNIQGEKLKKNAIEKENYREILQKSRLDIRAQLCEKKYNDNDPTKYNWVFIKPWADFTENTKDILESIIPSFKQNLRIINKTVNYYEKYNENGKKVKVRQIKGDNWAIRKPLHKETISGKVHLSYKTPAKGKILTATRKVLDSSMDFKSIEKITDTGIQKILKNYLEYKKSPELAFSPEGIEELNATITKYNNGFHHKPIYKVRIYEEGVKFPLGNKGNKKSKYVEAEKGTNLFFAIYKDQENNRYFETIPFNDVLETLKKGMSAVPEKNQEENTLVFALSPQDLVFVPTLDEIENPDIVDFKNLTKDQTNRIYKMVSSSGKQCFFIKAEVATSIVNKMEFSTSNKMENSIEGIQIKSNCWKLKLDRLGTITRVIK

SEQ ID NO: 236 - protein, 1389 aa, Oenococcus kitaharae
MARDYSVGLDIGTSSVGWAAIDNKYHLIRAKSKNLIGVRLFDSAVTAEKRRGYRTTRRRLSRRHWRLRLLNDIFAGPLTDFGDENFLARLKYSWVHPQDQSNQAHFAAGLLFDSKEQDKDFYRKYPTIYHLRLALMNDDQKHDLREVYLAIHHLVKYRGHFLIEGDVKADSAFDVHTFADAIQRYAESNNSDENLLGKIDEKKLSAALTDKHGSKSQRAETAETAFDILDLQSKKQIQAILKSVVGNQANLMAIFGLDSSAISKDEQKNYKFSFDDADIDEKIADSEALLSDTEFEFLCDLKAAFDGLTLKMLLGDDKTVSAAMVRRFNEHQKDWEYIKSHIRNAKNAGNGLYEKSKKFDGINAAYLALQSDNEDDRKKAKKIFQDEISSADIPDDVKADFLKKIDDDQFLPIQRTKNNGTIPHQLHRNELEQIIEKQGIYYPFLKDTYQENSHELNKITALINFRVPYYVGPLVEEEQKIADDGKNIPDPTNHWMVRKSNDTITPWNLSQVVDLDKSGRRFIERLTGTDTYLIGEPTLPKNSLLYQKFDVLQELNNIRVSGRRLDIRAKQDAFEHLFKVQKTVSATNLKDFLVQAGYISEDTQIEGLADVNGKNFNNALTTYNYLVSVLGREFVENPSNEELLEEITELQTVFEDKKVLRRQLDQLDGLSDHNREKLSRKHYTGWGRISKKLLTTKIVQNADKIDNQTFDVPRMNQSIIDTLYNTKMNLMEIINNAEDDFGVRAWIDKQNTTDGDEQDVYSLIDELAGPKEIKRGIVQSFRILDDITKAVGYAPKRVYLEFARKTQESHLTNSRKNQLSTLLKNAGLSELVTQVSQYDAAALQNDRLYLYFLQQGKDMYSGEKLNLDNLSNYDIDHIIPQAYTKDNSLDNRVLVSNITNRRKSDSSNYLPALIDKMRPFWSVLSKQGLLSKHKFANLTRTRDFDDMEKERFIARSLVETRQIIKNVASLIDSHFGGETKAVAIRSSLTADMRRYVDIPKNRDINDYHHAFDALLFSTVGQYTENSGLMKKGQLSDSAGNQYNRYIKEWIHAARLNAQSQRVNPFGFVVGSMRNAAPGKLNPETGEITPEENADWSIADLDYLHKVMNFRKITVTRRLKDQKGQLYDESRYPSVLHDAKSKASINFDKHKPVDLYGGFSSAKPAYAALIKFKNKFRLVNVLRQWTYSDKNSEDYILEQIRGKYPKAEMVLSHIPYGQLVKKDGALVTISSATELHNFEQLWLPLADYKLINTLLKTKEDNLVDILHNRLDLPEMTIESAFYKAFDSILSFAFNRYALHQNALVKLQAHRDDFNALNYEDKQQTLERILDALHASPASSDLKKINLSSGFGRLFSPSHFTLADTDEFIFQSVTGLFSTQKTVAQLYQETK

SEQ ID NO: 237 - protein, 1425 aa, Prevotella micans
MIQKIFGLDLGTNSIGSSVRNLELGENLTEQLEFFSSDIFGSSVSKNSNGREYSLAGNRSAHRRSRGLNEARRRKLWATLDLLIEHGLCPMSPDSLMQWRTYDKQKGLYRQYPIEDKDFNAWIMLDFNGDGKPDYSSPYQLRRELVVRQFDFDQPIERYKLGRALYHIAQHRGFKSSKGETIADQEKNEKKPIAEEGADIANEMKASETKLSKGLVAYMQENHLKTVGEAFAKLEDERVRIRNNESYRAIRSQYQDEIKEIFTYQKKLSVESELYERLTSEKKGVGTIFYKRPLRSQRGNVGKCTLERNKPRCPIGRPEFEEFRAWTLINNIKIRETAGEPYKQLPIKLRQELLKDCFLSKVKADFKFEDIRKYIEKRLGLSFSNDDKTINYKDSVSIAACPVTVRMKKLLGENWANCRIDGEKRRQAHGKNNNNEHIVSYTEEDIWHVCYNAEDPEEVSNFARKALHWDENKIKELVRLWTSIPQGYAMLSLKAIRNINRMLLLGLKYSDAVLLAKLPDIVPVSDEDILAITKEFLQLEDKLNQEKQINNIVNSLIANYKSKLEENRFADHNYQYQLGEGDDEDINTQIKSHIGAKLWVQIGADEQTKIFQAVRSKYQDFFKSYKRKFVESPKLGELLVAFLTEKFPNVKSKQWERLYHPSQIAIYRPIPVDNDRSKLRLGNPNIGAIKNPTVMRVLNTLRRRVNQLLDDGVISPDETRVVVETARELNDANTKWALDRYNRIRRDENEKIRKILKELNPTTNSISEQDIDKARYIFEQCETDFYTDGKVPYYNKDIKKYKLWLEQGGQCLYTGQTINLTNLFNPNAFDMEHTIPKSISFDNSDQNLTLCESYYNRFIKKNNIPTDMPNYDKDVTINGKEYTAIKPRLQRWKERVDRLSRNVDFWKGQARRAQDKDRKDECIREKHLWDMELAYWKGKLERFTMTDVTDGFKNSQLVDTRVITRHAVLYLKSIFNHVEVQRGETTAEFRKILGLQSIDEKKDRSLHSHHAIDATMLTVIPSAAKRDRMLELFYKIEETKKALKNYNDNNKTGLNLELKGLEEKLDKEKKDCRVGRRVNDLDRFINENIIVSHHTKDQALTPAHRRLRKRGKIVGGKEHPRWQTGDSLRGEIHKASYYGAITQFAKDANGKVLMKDGQAQIDPTIYYVIRRELKYKRSTQDSGFTNWEDLEKVIVDTDLFGLMKGQFPEGTSFKDACEQGFYMIKKGKNGEGDVKTHRIRHVRCKAVKTALRIKEQTYKSSKDYKQFFYAAVGDLYVMCYYTDGKKRDFKIYSLYDISNHRKSGTEDIPKFITDKKGNHLPLDYKLRTGDMVLLYKDNPEELKDLDQVNLKRRLYKVNRFESEGLIILLTHHLSTTTERGCSIGKIENYQNLPTAIRCGIKTIKFLIMGKHRDFVIRNGNIEFKH

SEQ ID NO: 238 - protein, 1473 aa, Mucilaginibacter paludis
MKNILGLDLGTNSIGWALIEKDTDQKNGNILGTGSRIIPMSQDIKDEFGKGNSISQTADRTKFRSVRRLRERHLLRRERLHRVLNVLGFLPKHYADQIDFKKRLGKLVNETEPKLVYDNKNFIFKKSFEAMLSDFNQHQPLLLADGKKVPFDWTIYYLRKKALTEKIEKEELAWLILNFNQKRGYYQLRGEEEEENPNKMVAFHSLKIVEVIADESQKGKAETWYSLILENGWIYRRSSKTPLYDWKGKQRDFIVTTDLNDDGSIKTDKEGLEKRSFRAPVEDDWTLVKKKTEQEINRSHKTVGTYIYENLLQDPKQKIKGKLVRTIEREFYKDELKMILKNQQKFHPELNDEHLYINCVRELYRNNQAHQTILSKKDFVHLFIDDIIFYQRPLRSQKSSISNCTLEFRKYKNENGTDQTDYLKAIPKSHPLFQEFRLWQWIYNLGIYQKEDDTNVTDELIKNIDGYQDLFDFLNNKKEIRQDILIKFLVEQTGLKGKPLSSVVAKYRWNFVEDKIYPCNETGTQIRTRLAKVENTPEDFLTAETEIKLWHIIYSVNDKADYEKALKTFAEKHNLDTHSFVENFKKFPPFKSEYGSFSEKAIKKLLPLIRLGKYWSWENIDKKTQERIEKILTGEFDEAIKSRVRDKAIHLTEEDHFQGLQLWLASYVVYGRHSEADNLDKWHTVADLEDYLAEFRQHSLRNPIVEQVITETLRVVKDIWLQYGQGAKDFFSEIHIELAREMKNTGDERKRLTSLVTDNENTNLRIKVLLSELLNDGNVENVRPYSPMQQEALKIFEDGVLNSDIEIEDDILKISKMAQPTNTELKRYKLWLEQKYRSPYTGQIIPLNRLFTADYEIEHIIPQSRFFDDSFSNKIICESAVNQLKDKQLGLEFIKNHSGTIVKLGMGKTAKILDVESYNEFVKGNYTKNISKRNKLMLEEIPDKMIERQLNDTRYISKFIISALSNIVRSESNDDGFNSKNVLPGNGKITSRLKQDWGMNDIWNELILPRFERMNKITDSAVFTAWNENNQKFLPIVPLEFSKGFQKKRIDHRHHALDALVIAASTREHINLLNNEHAKSDKRFDLNRKLRKFEKVAYNDPKTGKRIEKEVPTIFLKPWETFTVDAKNSLESIIVSFKQNLRVINRATNYSESYNDENGALRLGKDGNPLKEKIKQSKGDSWAIRKPMHKDFVYGKVHLQNVKLPKDKFITAIRKSLDVTFDLKRIETITDTGIQKILKNYLHSKENKVELAFSPEGIEDMNQHIERYNDGKKHQPIHKVRVFEIGSRFSLGESGNKKTKFVEAAKGTNLFFAVYQDDNKGKRNYETIPLNIVIERQKLGLHSVPTEDAKGGKLLFHLSPNDMVYVPTSEELEDNLASVNIKRLNTAQRKRIYKVEKASGVECYFIRQDIAYLIKNYDAKTKIGELESQNKLQTTMTDDRLKITDVCVKLNIDRLGSIAETFLGNQYGASKKT

SEQ ID NO: 239 - protein, 1365 aa, Filifactor alocis
MTKEYYLGLDVGTNSVGWAVTDSQYNLCKFKKKDMWGIRLFESANTAKDRRLQRGNRRRLERKKQRIDLLQEIFSPEICKIDPTFFIRLNESRLHLEDKSNDFKYPLFIEKDYSDIEYYKEFPTIFHLRKHLIESEEKQDIRLIYLALHNIIKTRGHFLIDGDLQSAKQLRPILDTFLLSLQEEQNLSVSLSENQKDEYEEILKNRSIAKSEKVKKLKNLFEISDELEKEEKKAQSAVIENFCKFIVGNKGDVCKFLRVSKEELEIDSFSFSEGKYEDDIVKNLEEKVPEKVYLFEQMKAMYDWNILVDILETEEYISFAKVKQYEKHKTNLRLLRDIILKYCTKDEYNRMFNDEKEAGSYTAYVGKLKKNNKKYWIEKKRNPEEFYKSLGKLLDKIEPLKEDLEVLTMMIEECKNHTLLPIQKNKDNGVIPHQVHEVELKKILENAKKYYSFLTETDKDGYSVVQKIESIFRFRIPYYVGPLSTRHQEKGSNVWMVRKPGREDRIYPWNMEEIIDFEKSNENFITRMTNKCTYLIGEDVLPKHSLLYSKYMVLNELNNVKVRGKKLPTSLKQKVFEDLFENKSKVTGKNLLEYLQIQDKDIQIDDLSGFDKDFKTSLKSYLDFKKQIFGEEIEKESIQNMIEDIIKWITIYGNDKEMLKRVIRANYSNQLTEEQMKKITGFQYSGWGNFSKMFLKGISGSDVSTGETFDIITAMWETDNNLMQILSKKFTFMDNVEDFNSGKVGKIDKITYDSTVKEMFLSPENKRAVWQTIQVAEEIKKVMGCEPKKIFIEMARGGEKVKKRTKSRKAQLLELYAACEEDCRELIKEIEDRDERDFNSMKLFLYYTQFGKCMYSGDDIDINELIRGNSKWDRDHIYPQSKIKDDSIDNLVLVNKTYNAKKSNELLSEDIQKKMHSFWLSLLNKKLITKSKYDRLTRKGDFTDEELSGFIARQLVETRQSTKAIADIFKQIYSSEVVYVKSSLVSDFRKKPLNYLKSRRVNDYHHAKDAYLNIVVGNVYNKKFTSNPIQWMKKNRDTNYSLNKVFEHDVVINGEVIWEKCTYHEDTNTYDGGTLDRIRKIVERDNILYTEYAYCEKGELFNATIQNKNGNSTVSLKKGLDVKKYGGYFSANTSYFSLIEFEDKKGDRARHIIGVPIYIANMLEHSPSAFLEYCEQKGYQNVRILVEKIKKNSLLIINGYPLRIRGENEVDTSFKRAIQLKLDQKNYELVRNIEKFLEKYVEKKGNYPIDENRDHITHEKMNQLYEVLLSKMKKFNKKGMADPSDRIEKSKPKFIKLEDLIDKINVINKMLNLLRCDNDTKADLSLIELPKNAGSFVVKKNTIGKSKIILVNQSVTGLYENRREL

SEQ ID NO: 240 - protein, 1130 aa, Streptococcus macedonicus
MTNGKILGLDIGIASVGVGIIEAKTGKVVHANSRLFSAANAENNAERRGFRGSRRLNRRKKHRVKRVRDLFEKYGIVTDFRNLNLNPYELRVKGLTEQLTNEELFAALRTISKRRGISYLDDAEDDSTGSTDYAKSIDENRRLLKTKTPGQIQLERLEKYGQLRGNFTVYDENGEAHRLINVFSTSDYEKEARKILETQADYNKKITAEFIDDYVEILTQKRKYYHGPGNEKSRTDYGRFRTDGTTLENIFGILIGKCNFYPDEYRASKASYTAQEYNFLNDLNNLKVPTETGKLSTEQKESLVEFAKNTAILGPAKLLKEIAKILDCKVDEIKGYREDDKGKPDLHTFEPYRKLKFNLDSVNIDYLSREVLDKLADILTLNTEREGIEDAIKRNLPNQFTEEQISEIINVRKSQSTAFNKGWHSFSAKLMNELIPELYATSDEQMTILTRLEKFKVKKKSSKNIKTIDEKEITDEIYNPVVAKSVRQTIKIINAAVKKYGDFDKIVIEMPRDKNADDEKKFINKRNKENKKEKDDALKRAAYLYNGTDKLPDEVFHGNKQLETKIRLWYQQGERCLYSGKPIPIQELVHNSNNFEIDHILPLSLSFDDSLANKVLVYSWTNQEKGQKTPYQVIDSMDAAWSFREMKEYVLKQKGLGKKKRDYLLTTENIDKIEVKKKFIERNLVDTRYASRVVLNSLQSALRELGKDTKVSVVRGQFTSQLRRKWKIDKSRETYHHHAVDALIIAASSQLKLWEKQDNPMFVDYGNNQVVDKQTGEILSVSDNEYKELVFQPPYQGFVNTISSKGFEDEILFSYQVDSKYNRKVSDATIYSTRKAKIGKDKKEETYVLGKIKDIYSQNGFDTFVKKYNKDKTQFLMYQKDPLTWENVIEVILGDYPTTKKSEDGKNDVKCNPFEEYRRENGLICKYSKKGKGTPIKSLKYYDKKLGNCIDITPEESRNKVILQSINPWRADVYFNPETLKYELMGLKYSDLSFEKGTGNYHISQEKYDAIKEKEGIGKKSEFKFTLYRNDLILIKDIASGEQEIYRFLSRTMPNVNHYVELKPYDKEKFDNVQELVEALGEADKVGRCIKSLNKPNISIYKVRTDVLGNKYFVKKEGDKPKLDFKNNKK

SEQ ID NO: 241 - protein, 1367 aa, Streptococcus pyogenes
MDKKYSIGLDIGTNSVGWAVITDDYKVPSKKFKVLGNTDRHSIKKNLIGALLFGSGETAEATRLKRTARRRYTRRKNRICYLQEIFSNEMAKVDDSFFHRLEESFLVEEDKKHERHPIFGNIVDEVAYHEKYPTIYHLRKKLADSTDKADLRLIYLALAHMIKFRGHFLIEGDLNPDNSDVDKLFIQLVQIYNQLFEENPINASRVDAKAILSARLSKSRRLENLIAQLPGEKRNGLFGNLIALSLGLTPNFKSNFDLAEDAKLQLSKDTYDDDLDNLLAQIGDQYADLFLAAKNLSDAILLSDILRVNSEITKAPLSASMIKRYDEHHQDLTLLKALVRQQLPEKYKEIFFDQSKNGYAGYIDGGASQEEFYKFIKPILEKMDGTEELLVKLNREDLLRKQRTFDNGSIPHQIHLGELHAILRRQEDFYPFLKDNREKIEKILTFRIPYYVGPLARGNSRFAWMTRKSEETITPWNFEEVVDKGASAQSFIERMTNFDKNLPNEKVLPKHSLLYEYFTVYNELTKVKYVTEGMRKPAFLSGEQKKAIVDLLFKTNRKVTVKQLKEDYFKKIECFDSVEISGVEDRFNASLGAYHDLLKIIKDKDFLDNEENEDILEDIVLTLTLFEDRGMIEERLKTYAHLFDDKVMKQLKRRRYTGWGRLSRKLINGIRDKQSGKTILDFLKSDGFANRNFMQLIHDDSLTFKEDIQKAQVSGQGHSLHEQIANLAGSPAIKKGILQTVKIVDELVKVMGHKPENIVIEMARENQTTQKGQKNSRERMKRIEEGIKELGSQILKEHPVENTQLQNEKLYLYYLQNGRDMYVDQELDINRLSDYDVDHIVPQSFIKDDSIDNKVLTRSDKNRGKSDNVPSEEVVKKMKNYWRQLLNAKLITQRKFDNLTKAERGGLSELDKAGFIKRQLVETRQITKHVAQILDSRMNTKYDENDKLIREVKVITLKSKLVSDFRKDFQFYKVREINNYHHAHDAYLNAVVGTALIKKYPKLESEFVYGDYKVYDVRKMIAKSEQEIGKATAKYFFYSNIMNFFKTEITLANGEIRKRPLIETNGETGEIVWDKGRDFATVRKVLSMPQVNIVKKTEVQTGGFSKESILPKRNSDKLIARKKDWDPKKYGGFDSPTVAYSVLVVAKVEKGKSKKLKSVKELLGITIMERSSFEKNPIDFLEAKGYKEVKKDLIIKLPKYSLFELENGRKRMLASAGELQKGNELALPSKYVNFLYLASHYEKLKGSPEDNEQKQLFVEQHKHYLDEIIEQISEFSKRVILADANLDKVLSAYNKHRDKPIREQAENIIHLFTLTNLGAPAAFKYFDTTIDRKRYTSTKEVLDATLIHQSITGLYETRIDLSQLGGD

SEQ ID NO: 242 - protein, 1233 aa, Mycoplasma canis
MEKKRKVTLGFDLGIASVGWAIVDSETNQVYKLGSRLFDAPDTNLERRTQRGTRRLLRRRKYRNQKFYNLVKRTEVFGLSSREAIENRFRELSIKYPNIIELKTKALSQEVCPDEIAWILHDYLKNRGYFYDEKETKEDFDQQTVESMPSYKLNEFYKKYGYFKGALSQPTESEMKDNKDLKEAFFFDFSNKEWLKEINYFFNVQKNILSETFIEEFKKIFSFTRDISKGPGSDNMPSPYGIFGEFGDNGQGGRYEHIWDKNIGKCSIFTNEQRAPKYLPSALIFNFLNELANIRLYSTDKKNIQPLWKLSSVDKLNILLNLFNLPISEKKKKLTSTNINDIVKKESIKSIMISVEDIDMIKDEWAGKEPNVYGVGLSGLNIEESAKENKFKFQDLKILNVLINLLDNVGIKFEFKDRNDIIKNLELLDNLYLFLIYQKESNNKDSSIDLFIAKNESLNIENLKLKLKEFLLGAGNEFENHNSKTHSLSKKAIDEILPKLLDNNEGWNLEAIKNYDEEIKSQIEDNSSLMAKQDKKYLNDNFLKDAILPPNVKVTFQQAILIFNKIIQKFSKDFEIDKVVIELAREMTQDQENDALKGIAKAQKSKKSLVEERLEANNIDKSVFNDKYEKLIYKIFLWISQDFKDPYTGAQISVNEIVNNKVEIDHIIPYSLCFDDSSANKVLVHKQSNQEKSNSLPYEYIKQGHSGWNWDEFTKYVKRVFVNNVDSILSKKERLKKSENLLTASYDGYDKLGFLARNLNDTRYATILFRDQLNNYAEHHLIDNKKMFKVIAMNGAVTSFIRKNMSYDNKLRLKDRSDFSHHAYDAAIIALFSNKTKTLYNLIDPSLNGIISKRSEGYWVIEDRYTGEIKELKKEDWTSIKNNVQARKIAKEIEEYLIDLDDEVFFSRKTKRKTNRQLYNETIYGIATKTDEDGITNYYKKEKFSILDDKDIYLRLLREREKFVINQSNPEVIDQIIEIIESYGKENNIPSRDEAINIKYTKNKINYNLYLKQYMRSLTKSLDQFSEEFINQMIANKTFVLYNPTKNTTRKIKFLRLVNDVKINDIRKNQVINKFNGKNNEPKAFYENINSLGAIVFKNSANNFKTLSINTQIAIFGDKNWDIEDFKTYNMEKIEKYKEIYGIDKTYNFHSFIFPGTILLDKQNKEFYYISSIQTVRDIIEIKFLNKIEFKDENKNQDTSKTPKRLMFGIKSIMNNYEQVDISPFGINKKIFE

SEQ ID NO: 243 - protein, 1375 aa, Lactobacillus johnsonii
MTKIKDDYIVGLDIGTDSCGWVAMNSNNDILKLQGKTAIGSRLFEGGKSAAERRLFRTTHRRIKRRRWRLKLLEEFFDPYMAEVDPYFFARLKESGLSPLDKRKTVSSIVFPTSAEDKKFYDDYPTIYHLRYKLMTEDEKFDLREVYLAIHHIIKYRGNFLYNTSVKDFKASKIDVKSSIEKLNELYENLGLDLNVEFNISNTAEIEKVLKDKQIFKRDKVKKIAELFAIKTDNKEQSKRIKDISKQVANAVLGYKTRFDTIALKEISKDELSDWNFKLSDIDADSKFEALMGNLDENEQAILLTIKELFNEVTLNGIVEDGNTLSESMINKYNDHRDDLKLLKEVIENHIDRKKAKELALAYDLYVNNRHGQLLQAKKKLGKIKPRSKEDFYKVVNKNLDDSRASKEIKKKIELDSFMPKQRTNANGVIPYQLQQLELDKIIENQSKYYPFLKEINPVSSHLKEAPYKLDELIRFRVPYYVGPLISPNESTKDIQTKKNQNFAWMIRKEEGRITPWNFDQKVDRIESANKFIKRMTTKDTYLFGEDVLPANSLLYQKFTVLNELNNIRINGKRISVDLKQEIYENLFKKHTTVTVKKLENYLKENHNLVKVEIKGLADEKKFNSGLTTYNRFKNLNIFDNQIDDLKYRNDFEKIIEWSTIFEDKSIYKEKLRSIDWLNEKQINALSNIRLQGWGRLSKKLLAQLHDHNGQTIIEQLWDSQNNFMQIVTQADFKDAIAKANQNLLVATSVEDILNNAYTSPANKKAIRQVIKVVDDIVKAASGKVPKQIAIEFTRDADENPKRSQTRGSKLQKVYKDLSTELASKTIAEELNEAIKDKKLVQDKYYLYFMQLGRDAYTGEPINIDEIQKYDIDHILPQSFIKDDALDNRVLVSRAVNNGKSDNVPVKLFGNEMAANLGMTIRKMWEEWKNIGLISKTKYNNLLTDPDHINKYKSAGFIRRQLVETSQIIKLVSTILQSRYPNTEIITVKAKYNHYLREKFDLYKSREVNDYHHAIDAYLSAICGNLLYQNYPNLRPFFVYGQYKKFSSDPDKEKAIFNKTRKFSFISQLLKNKSENSKEIAKKLKRAYQFKYMLVSRETETRDQEMFKMTVYPRFSHDTVKAPRNLIPKKMGMSPDIYGGYTNNSDAYMVIVRIDKKKGTEYKILGIPTRELVNLKKAEKEDHYKSYLKEILTPRILYNKNGKRDKKITSFEIVKSKIPYKQVIQDGDKKFMLGSSTYVYNAKQLTLSTESMKAITNNFDKDSDENDALIKAYDEILDKVDKYLPLFDINKFREKLHSGREKFIKLSLEDKKDTILKVLEGLHDNAVMTKIPTIGLSTPLGFMQFPNGVILSENAKLIYQSPTGLFKKSVKISDL

SEQ ID NO: 244 - protein, 1053 aa, Staphylococcus aureus
MKRNYILGLDIGITSVGYGIIDYETRDVIDAGVRLFKEANVENNEGRRSKRGARRLKRRRRHRIQRVKKLLFDYNLLTDHSELSGINPYEARVKGLSQKLSEEEFSAALLHLAKRRGVHNVNEVEEDTGNELSTKEQISRNSKALEEKYVAELQLERLKKDGEVRGSINRFKTSDYVKEAKQLLKVQKAYHQLDQSFIDTYIDLLETRRTYYEGPGEGSPFGWKDIKEWYEMLMGHCTYFPEELRSVKYAYNADLYNALNDLNNLVITRDENEKLEYYEKFQIIENVFKQKKKPTLKQIAKEILVNEEDIKGYRVTSTGKPEFTNLKVYHDIKDITARKEIIENAELLDQIAKILTIYQSSEDIQEELTNLNSELTQEEIEQISNLKGYTGTHNLSLKAINLILDELWHTNDNQIAIFNRLKLVPKKVDLSQQKEIPTTLVDDFILSPVVKRSFIQSIKVINAIIKKYGLPNDIIIELAREKNSKDAQKMINEMQKRNRQTNERIEEIIRTTGKENAKYLIEKIKLHDMQEGKCLYSLEAIPLEDLLNNPFNYEVDHIIPRSVSFDNSFNNKVLVKQEENSKKGNRTPFQYLSSSDSKISYETFKKHILNLAKGKGRISKTKKEYLLEERDINRFSVQKDFINRNLVDTRYATRGLMNLLRSYFRVNNLDVKVKSINGGFTSFLRRKWKFKKERNKGYKHHAEDALIIANADFIFKEWKKLDKAKKVMENQMFEEKQAESMPEIETEQEYKEIFITPHQIKHIKDFKDYKYSHRVDKKPNRELINDTLYSTRKDDKGNTLIVNNLNGLYDKDNDKLKKLINKSPEKLLMYHHDPQTYQKLKLIMEQYGDEKNPLYKYYEETGNYLTKYSKKDNGPVIKKIKYYGNKLNAHLDITDDYPNSRNKVVKLSLKPYRFDVYLDNGVYKFVTVKNLDVIKKENYYEVNSKCYEEAKKLKKISNQAEFIASFYNNDLIKINGELYRVIGVNNDLLNRIEVNMIDITYREYLENMNDKRPPRIIKTIASKTQSIKKYSTDILGNLYEVKSKKHPQIIKKG

SEQ ID NO: 245 - protein, 1063 aa, Simonsiella muelleri
MEKFHYVLGLDLGIASVGWAAIEIDKETETSIGLLDCGVRTFERAEVPKTGDSLAKARREARSTRRLIRRRSHRLLRLKRLLKREIFRQPETFKDLPINAWQLRVKGLDSRLNEYEWAAVLLHLVKHRGYLSQRKSEMSETDSKSEMGRLLAGVAENHQLLQQEQYRTPAELALKKFVKHFRNKGGDYAHTFNRLDLQAELHLLFQKQRELGNPFTSPELERQVDDLLMTQRSALQGDAILKMLGHCGFEPEQFKAAKNTFSAERFIWLTKLNNLRIQDQGKERALTADERTKLLDEPYKKSKLTYAQVRKLLSLPQTAIFKGLRYDLEHDKKAENSTLMEMKSYHNIRQTLEKSGLKTEWQSIATQPEILDAIGTAFSIYKTDEDISHELKTCRLPENVLNELLKNINFDGFIQLSLTALRKILPLMEQGYRYDEACTQIYGNHHSGSLQQESKQFLPHIPIDDVRNPVVFRTLTQARKVVNAIIRRYGSPARVHIEMARELGKSKSDRDRIEKQQQKNKKERENAVAKFKEDFPDFVGEPRGKDILKMRLYEQQHGKCLYSGHDIDINRLNEKGYVEIDHALPFSRTWDDSQNNKVLVLGSENQNKRNQTPDEYLDGANNSQRWLEFQARVQTCHFSYGKKQRIQLAKLDDETEKGFLERNLNDTRYIARFMCQFVQENLYLTGKGKRLVFASNGGMTATLRNLWGLRKVREDNDRHHALDAIVVACSTASMQQKITKAFQRHESIEYVDTETGEVKFRIPQPWDFFRQEVMIRVFSDQPCEDLVEKLSARPEALHDNVTPLFVSRAPNRKMSGQGHLETIKSAKRLSEENSMVKKPLTTLKLKDIPEIVGYPSREPQLYAALKTRLETHDDDPIKAFAKPFYKPNKNGELGALVRSVRVKGVQNTGVMVHDGKGIADNATMVRVDVYTKAGKNYLVPVYVWQVAQGILPNRAVTSGKSEADWDLIDESFEFKFSLSRGDLVEMISNKGRIFGYYNGLDRANGSIGIREHDLEKSKGKDGVHRVGVKTATAFNKYHVDPLGKEIHRCSSEPRPTLKIKSKK

SEQ ID NO: 246 - protein, 1509 aa, Psychroflexus torquis
MKRILGLDLGTNSIGWSLIEHDFKNKQGQIEGLGVRIIPMSQEILGKFDAGQSISQTADRTKYRGVRRLYQRDNLRRERLHRVLKILDFLPKHYSESIDFQDKVGQFKPKQEVKLNYRKNEKNKHEFVFMNSFIEMVSEFKNAQPELFYNKGNGEETKIPYDWTLYYLRKKALTQQITKEELAWLILNFNQKRGYYQLRGEDIDEDKNKKYMQLKVNNLIDSGAKVKGKVLYNVIFDNGWKYEKQIVNKDEWEGRTKEFIITTKTLKNGNIKRTYKAVDSEIDWAAIKAKTEQDINKANKTVGEYIYESLLDNPSQKIRGKLVKTIERKFYKEEFEKLLSKQIELQPELFNESLYKACIKELYPRNENHQSNNKKQGFEYLFTEDIIFYQRPLKSQKSNISGCQFEHKIYKQKNKKTGKLELIKEPIKTISRSHPLFQEFRIWQWLQNLKIYNKEKIENGKLEDVTTQLLPNNEAYVTLFDFLNTKKELEQKQFIEYFVKKKLIDKKEKEHFRWNFVEDKKYPFSETRAQFLSRLAKVKGIKNTEDFLNKNTQVGSKENSPFIKRIEQLWHIIYSVSDLKEYEKALEKFAEKHNLEKDSFLKNFKKFPPFVSDYASYSKKAISKLLPIMRMGKYWSESAVPTQVKERSLSIMERVKVLPLKEGYSDKDLADLLSRVSDDDIPKQLIKSFISFKDKNPLKGLNTYQANYLVYGRHSETGDIQHWKTPEDIDRYLNNFKQHSLRNPIVEQVVMETLRVVRDIWEHYGNNEKDFFKEIHVELGREMKSPAGKREKLSQRNTENENTNHRIREVLKELMNDASVEGGVRDYSPSQQEILKLYEEGIYQNPNTNYLKVDEDEILKIRKKNNPTQKEIQRYKLWLEQGYISPYTGKIIPLTKLFTHEYQIEHIIPQSRYYDNSLGNKIICESEVNEDKDNKTAYEYLKVEKGSIVFGHKLLNLDEYEAHVNKYFKKNKTKLKNLLSEDIPEGFINRQLNDSRYISKLVKGLLSNIVRENGEQEATSKNLIPVTGVVTSKLKQDWGLNDKWNEIIAPRFKRLNKLTNSNDFGFWDNDINAFRIQVPDSLIKGFSKKRIDHRHHALDALVVACTSRNHTHYLSALNAENKNYSLRDKLVIKNENGDYTKTFQIPWQGFTIEAKNNLEKTVVSFKKNLRVINKTNNKFWSYKDENGNLNLGKDGKPKKKLRKQTKGYNWAIRKPLHKETVSGIYNINAPKNKIATSVRTLLTEIKNEKHLAKITDLRIRETILPNHLKHYLNNKGEANFSEAFSQGGIEDLNKKITTLNEGKKHQPIYRVKIFEVGSKFSISEDENSAKSKKYVEAAKGTNLFFAIYLDEENKKRNYETIPLNEVITHQKQVAGFPKSERLSVQPDSQKGTFLFTLSPNDLVYVPNNEELENRDLFNLGNLNVEQISRIYKFTDSSDKTCNFIPFQVSKLIFNLKKKEQKKLDVDFIIQNEFGLGSPQSKNQKSIDDVMIKEKCIKLKIDRLGNISKA

SEQ ID NO: 247 - protein, 1112 aa, Staphylococcus simulans
MLVGLKFKQSILFENMENAEDIKESATGSDAISLSDDYYENLSEFLTDEQLNFIESANTFFMGIMLDRILKGATSISAAKVRDYKIFKSQLKLIKDIVYQNKYDKYHEFFVTSKEDMRAYQENPDAKNFGKLSKFDQYLIHSKDQYAKLMKDLKGLVPKEYTEVLNLIDEQKFLVVQNTTDNASIPYQNNVFEAENILRNQQKYYPEITEEMIGKVINLISFRIPYYVGPLTNKNGQSDFAWMIRKSDEQTLPWNFDKVIDKSKSAEKFIRRMTSKCTYLLEEDVLPKHSLLYQEMEVLNELNNVQLRGENEPKHRIHRLDPKVKQFIYHNLFQKKKNVTHKDLITLLQNSEHRNTLNKTSGQKLKVFGTQNDSKFASKLSTYNDMKAILGSVENKRQMIEELVLWITIFEDKAILKQKIGEKYPNITEKQLNQIVKLNYSGWGRLSEKLLTKEVNGRSLIDLMYSTENNFMEIITDKTLGFDCFIKNSNKVKNAKISYKDVAELRTSPALKKGIWNAIKMVREISNLFGAPEKIIIEFATEDQAKGKRQKSRSELWDDLVKKNNLKRNKEFEGLFEELKAYPDLDFSNPKLWLYIHQNGKCMYTKKPIDLERLMSDTNNQLYEIDHILPRTFVKDDSINNKVLVIQSANQKKSGDKMPLEIFDNHVLVPFWKMLYENDLISSSKLSKLMKKEFNDLDKEGFIQRQLVETRQIISHVSDFLTEEYPSTTVVPMKANVVSELRRKFDIPKIRQLNDWHHAVDAYLNGFVYQAARVFYPKVNLFEFNFKWEKVREKWRQLGEFTENNKKREFFLFKRMENYVNEYGEGMISKLIFDLDNFKFNYSRKVESTESAFYKQSAFSPKNTTAQYDSDKNKTAIYKEMKNKRGIVVSYTYVKKDQELIGYGVFNETVFEYVNNADVDMNTRALKIVRKAFPKLDIKKAQYLFSINKGDALLVNGHPFLFVSAYERINGKQLEFDIAMQRKIKQALSPYNNMTEQEKVEFYNQFAEKVIEEFRNSIGLQSRDRKVNLIKNLFNNTEKSNDSMTQSILEVLKMTKVSAERSKELKIRWNGQTPNTFIDTKNNAEIQYKSITGLKTTKPKSIFKLAESKNEL

SEQ ID NO: 248 - protein, 1274 aa, Mycoplasma gallisept
MNINMNNSIKSKPEVTIGLDLGVGSVGWAIVDNETNIIHHLGSRLFSQAKTAEDRRSFRGVRRLIRRRKYKLKRFVNLIWKYNSYFGFKNKEDILNNYQEQQKLHNTVLNLKLEALNAKIDPKALSWILHDYLKNRGHFYEDNRDFNVYPTEELANYFDEFGYYKGIIDSKNDDDDKLEEGLTKYKFSNQHWLEEVKKVLSNQTGLPEKFKEEYESLFSYVRNYSEGPGSINSVSPYGIYHLDEKEGKVVQKYNNIWDKTIGKCSIFPDEYRAPKNSPIAMIFNEINELSTIRSYSIYLTGWFINQEFKKAYLNKLLDLLIKTNSEKPIDARQFKKLREETIAESIGKETLKDVESEEKLEKDDHKWKLKGLKLNTNGKIQYNDLSSLAKFVHKLKQHLKLDFLLEDQYTPLDKINFLQSLYVYLGKHLRYSNRVDSANLKEFSDSSRLFERVLQEQKDGLFKLFEQTDKDDEKILTQTHSLSTKAMLLAITRMTNLDNDEDNQKNNDKGWNFEAIKNFDQKFIDITKTNNNLSLKQDKRYLDDQFINDAILSPGVKRILREATKVFNAILKQFSEEYDVTKVVIELARELSEEKELENTKNYKKLIKKNGDKISEGLKALGIAEDKIEEILKSPTKSYKVLLWLQQDHIDPYSQKEIAFDDILTKTEKTEIDHIIPYSISFDDSSSNKLLVLAESNQAKSNQTPYEFINSGKAEITWEVYEAYCHKFKNGDSSLLDSTQRSKKFAKMMKTDTSSKYDIGFLARNLNDTRYATIVFRDALKDYANNHLVEDKPMFKVVCINGGVTSFLRKNFDPKSWYAKKDRDKNIHHAVDASIISIFSNETKTLFNQLTKFADYKLFKNTDGSWKKIDPKTGVVSEVTDENWKQIRVRNQVSEIAKVIDKYIQDSNIERKARYSRKIENKTNISLFNDTVYSAKKVGYEDQIKRKNLKTLDIHESAEENKNSKVKKQFVYRKLVNVSLLNNDKLADLFAEKEDILMYRANPWVINLAEQIFNEYTENKKIKSQNVFEKYMLDLTKEFPEKFSEAFVKSMIRNKTAIIYNVEKDVVHRIKRLKILSSELKENKWSNVIIRSKNESGTKLSYQDTINSIALMIMRSIDPTAKKQYIRVPLNTLNLHLGDQDFDLHNIDAYLKKPKFVKYLKANEIGDEYKPWRVLTSGTLLIHKKDKKLMYISSFQNLNDLIEIKNLIETEYKENVDSDPKKKKKASQILRSLSVILNDYILLDAKYNFDILGLSKNKIDEILNSKLDLDKIAK

SEQ ID NO: 249 - protein, 1122 aa, synthetic construct; identical to SEQ ID NO: 18
  REGION 1..1122: note = Description of Artificial Sequence: Synthetic polypeptide

SEQ ID NO: 250 - protein, 1236 aa, synthetic construct; identical to SEQ ID NO: 16
  REGION 1..1236: note = Description of Artificial Sequence: Synthetic polypeptide

SEQ ID NO: 251 - protein, 1059 aa, synthetic construct; identical to SEQ ID NO: 10
  REGION 1..1059: note = Description of Artificial Sequence: Synthetic polypeptide

SEQ ID NO: 252 - protein, 1166 aa, synthetic construct; identical to SEQ ID NO: 34
  REGION 1..1166: note = Description of Artificial Sequence: Synthetic polypeptide

SEQ ID NO: 253 - protein, 1149 aa, synthetic construct; identical to SEQ ID NO: 32
  REGION 1..1149: note = Description of Artificial Sequence: Synthetic polypeptide

SEQ ID NO: 254 - protein, 1314 aa, synthetic construct; identical to SEQ ID NO: 22
  REGION 1..1314: note = Description of Artificial Sequence: Synthetic polypeptide

SEQ ID NO: 255 - protein, 1064 aa, synthetic construct; identical to SEQ ID NO: 33
  REGION 1..1064: note = Description of Artificial Sequence: Synthetic polypeptide

SEQ ID NO: 256 - protein, 1401 aa, synthetic construct
  REGION 1..1401: note = Description of Artificial Sequence: Synthetic polypeptide
MDKKYSIGLDIGTNSVGWAVITDEYKVPSKKFKVLGNTDRHSIKKNLIGALLFDSGETAEATRLKRTARRRYTRRKNRICYLQEIFSNEMAKVDDSFFHRLEESFLVEEDKKHERHPIFGNIVDEVAYHEKYPTIYHLRKKLVDSTDKADLRLIYLALAHMIKFRGHFLIEGDLNPDNSDVDKLFIQLVQTYNQLFEENPINASGVDAKAILSARLSKSRRLENLIAQLPGEKKNGLFGNLIALSLGLTPNFKSNFDLAEDAKLQLSKDTYDDDLDNLLAQIGDQYADLFLAAKNLSDAILLSDILRVNTEITKAPLSASMIKRYDEHHQDLTLLKALVRQQLPEKYKEIFFDQSKNGYAGYIDGGASQEEFYKFIKPILEKMDGTEELLVKLNREDLLRKQRTFDNGSIPHQIHLGELHAILRRQEDFYPFLKDNREKIEKILTFRIPYYVGPLARGNSRFAWMTRKSEETITPWNFEEVVDKGASAQSFIERMTNFDKNLPNEKVLPKHSLLYEYFTVYNELTKVKYVTEGMRKPAFLSGEQKKAIVDLLFKTNRKVTVKQLKEDYFKKIECFDSVEISGVEDRFNASLGTYHDLLKIIKDKDFLDNEENEDILEDIVLTLTLFEDREMIEERLKTYAHLFDDKVMKQLKRRRYTGWGRLSRKLINGIRDKQSGKTILDFLKSDGFANRNFMQLIHDDSLTFKEDIQKAQVSGQGDSLHEHIANLAGSPAIKKGILQTVKVVDELVKVMGRHKPENIVIEMARENQTTQKGQKNSRERMKRIEEGIKELGSQILKEHPVENTQLQNEKLYLYYLQNGRDMYVDQELDINRLSDYDVDHIVPQSFLKDDSIDNKVLTRSDKNRGKSDNVPSEEVVKKMKNYWRQLLNAKLITQRKFDNLTKAERGGLSELDKAGFIKRQLVETRQITKHVAQILDSRMNTKYDENDKLIREVKVITLKSKLVSDFRKDFQFYKVREINNYHHAHDAYLNAVVGTALIKKYPKLESEFVYGDYKVYDVRKMIAKSEQEIGKATAKYFFYSNIMNFFKTEITLANGEIRKRPLIETNGETGEIVWDKGRDFATVRKVLSMPQVNIVKKTEVQTGGFSKESILPKRNSDKLIARKKDWDPKKYGGFDSPTVAYSVLVVAKVEKGKSKKLKSVKELLGITIMERSSFEKNPIDFLEAKGYKEVKKDLIIKLPKYSLFELENGRKRMLASAGELQKGNELALPSKYVNFLYLASHYEKLKGSPEDNEQKQLFVEQHKHYLDEIIEQISEFSKRVILADANLDKVLSAYNKHRDKPIREQAENIIHLFTLTNLGAPAAFKYFDTTIDRKRYTSTKEVLDATLIHQSITGLYETRIDLSQLGGDAYPYDVPDYASLGSGSPKKKRKVEDPKKKRKVD

SEQ ID NO: 257 - protein, 1368 aa, synthetic construct
  REGION 1..1368: note = Description of Artificial Sequence: Synthetic polypeptide
MDKKYSIGLAIGTNSVGWAVITDDYKVPSKKLKGLGNTDRHGIKKNLIGALLFDSGETAEATRLKRTARRRYTRRKNRICYLQEIFSNEMAKVDDSFFHRLEESFLVEEDKKHERHPIFGNIVDEVAYHEKYPTIYHLRKKLADSTDKVDLRLIYLALAHMIKFRGHFLIEGDLNPDNSDVDKLFIQLVQTYNQLFEENPINASRVDAKAILSARLSKSRRLENLIAQLPGEKKNGLFGNLIALSLGLTPNFKSNFDLAEDAKLQLSKDTYDDDLDNLLAQIGDQYADLFLAAKNLSDATLLSDILRVNSEITKAPLSASMIKRYDEHHQDLTLLKALVRQQLPEKYKEIFFDQSKNGYAGYIDGGASQEEFYKFIKPILEKMDGTEELLAKLNREDLLRKQRTFDNGSIPYQIHLGELHAILRRQEDFYPFLKDNREKIEKILTFRIPYYVGPLARGNSRFAWMTRKSEETITPWNFEEVVDKGASAQSFIERMTNFDKNLPNEKVLPKHSLLYEYFTVYNELTKVKYVTEGMRKPAFLSGEQKKAIVDLLFKTNRKVTVKQLKEDYFKKIECFDSVEISGVEDRFNASLGTYHDLLKIIKDKDFLDNEENEDILEDIVLTLTLFEDREMIEERLKTYAHLFDDKVMKQLKRRRYTGWGRLSRKLINGIRDKQSGKTILDFLKSDGFANRNFMQLIHDDSLTFKEDIQKAQVSGQGDSLHEHIANLAGSPAIKKGILQTVKVVDELVKVMGRHKPENIVIEMARENQTTQKGQKNSRERMKRIEEGIKELGSDILKEYPVENTQLQNEKLYLYYLQNGRDMYVDQELDINRLSDYDVDHIVPQSFLKDDSIDNKVLTRSDKNRGKSDNVPSEEVVKKMKNYWRQLLNAKLITQRKFDNLTKAERGGLSELDKVGFIKRQLVETRQITKHVAQILDSRMNTKYDENDKLIREVRVITLKSKLVSDFRKDFQFYKVREINNYHHAHDAYLNAVVGTALIKKYPKLESEFVYGDYKVYDVRKMIAKSEQEIGKATAKYFFYSNIMNFFKTEITLANGEIRKRPLIETNGETGEIVWDKGRDFATVRKVLSMPQVNIVKKTEVQTGGFSKESILPKRNSDKLIARKKDWDPKKYGGFDSPTVAYSVLVVAKVEKGKSKKLKSVKELLGITIMERSSFEKDPIDFLEAKGYKEVRKDLIIKLPKYSLFELENGRKRMLASAGELQKGNELALPSKYVNFLYLASHYEKLKGSPEDNEQKQLFVEQHKHYLDEIIEQISEFSKRVILADANLDKVLSAYNKHRDKPIREQAENIIHLFTLTNLGAPAAFKYFDTTIDRKRYTSTKEVLDATLIHQSITGLYETRIDLSQLGGD

SEQ ID NO: 258 - protein, 1368 aa, synthetic construct
  REGION 1..1368: note = Description of Artificial Sequence: Synthetic polypeptide
MDKKYSIGLDIGTNSVGWAVITDDYKVPSKKLKGLGNTDRHGIKKNLIGALLFDSGETAEATRLKRTARRRYTRRKNRICYLQEIFSNEMAKVDDSFFHRLEESFLVEEDKKHERHPIFGNIVDEVAYHEKYPTIYHLRKKLADSTDKVDLRLIYLALAHMIKFRGHFLIEGDLNPDNSDVDKLFIQLVQTYNQLFEENPINASRVDAKAILSARLSKSRRLENLIAQLPGEKKNGLFGNLIALSLGLTPNFKSNFDLAEDAKLQLSKDTYDDDLDNLLAQIGDQYADLFLAAKNLSDATLLSDILRVNSEITKAPLSASMIKRYDEHHQDLTLLKALVRQQLPEKYKEIFFDQSKNGYAGYIDGGASQEEFYKFIKPILEKMDGTEELLAKLNREDLLRKQRTFDNGSIPYQIHLGELHAILRRQEDFYPFLKDNREKIEKILTFRIPYYVGPLARGNSRFAWMTRKSEETITPWNFEEVVDKGASAQSFIERMTNFDKNLPNEKVLPKHSLLYEYFTVYNELTKVKYVTEGMRKPAFLSGEQKKAIVDLLFKTNRKVTVKQLKEDYFKKIECFDSVEISGVEDRFNASLGTYHDLLKIIKDKDFLDNEENEDILEDIVLTLTLFEDREMIEERLKTYAHLFDDKVMKQLKRRRYTGWGRLSRKLINGIRDKQSGKTILDFLKSDGFANRNFMQLIHDDSLTFKEDIQKAQVSGQGDSLHEHIANLAGSPAIKKGILQTVKVVDELVKVMGRHKPENIVIEMARENQTTQKGQKNSRERMKRIEEGIKELGSDILKEYPVENTQLQNEKLYLYYLQNGRDMYVDQELDINRLSDYDVDAIVPQSFLKDDSIDNKVLTRSDKNRGKSDNVPSEEVVKKMKNYWRQLLNAKLITQRKFDNLTKAERGGLSELDKVGFIKRQLVETRQITKHVAQILDSRMNTKYDENDKLIREVRVITLKSKLVSDFRKDFQFYKVREINNYHHAHDAYLNAVVGTALIKKYPKLESEFVYGDYKVYDVRKMIAKSEQEIGKATAKYFFYSNIMNFFKTEITLANGEIRKRPLIETNGETGEIVWDKGRDFATVRKVLSMPQVNIVKKTEVQTGGFSKESILPKRNSDKLIARKKDWDPKKYGGFDSPTVAYSVLVVAKVEKGKSKKLKSVKELLGITIMERSSFEKDPIDFLEAKGYKEVRKDLIIKLPKYSLFELENGRKRMLASAGELQKGNELALPSKYVNFLYLASHYEKLKGSPEDNEQKQLFVEQHKHYLDEIIEQISEFSKRVILADANLDKVLSAYNKHRDKPIREQAENIIHLFTLTNLGAPAAFKYFDTTIDRKRYTSTKEVLDATLIHQSITGLYETRIDLSQLGGD

SEQ ID NO: 259 - protein, 1368 aa, synthetic construct
  REGION 1..1368: note = Description of Artificial Sequence: Synthetic polypeptide
MDKKYSIGLAIGTNSVGWAVITDDYKVPSKKLKGLGNTDRHGIKKNLIGALLFDSGETAEATRLKRTARRRYTRRKNRICYLQEIFSNEMAKVDDSFFHRLEESFLVEEDKKHERHPIFGNIVDEVAYHEKYPTIYHLRKKLADSTDKVDLRLIYLALAHMIKFRGHFLIEGDLNPDNSDVDKLFIQLVQTYNQLFEENPINASRVDAKAILSARLSKSRRLENLIAQLPGEKKNGLFGNLIALSLGLTPNFKSNFDLAEDAKLQLSKDTYDDDLDNLLAQIGDQYADLFLAAKNLSDATLLSDILRVNSEITKAPLSASMIKRYDEHHQDLTLLKALVRQQLPEKYKEIFFDQSKNGYAGYIDGGASQEEFYKFIKPILEKMDGTEELLAKLNREDLLRKQRTFDNGSIPYQIHLGELHAILRRQEDFYPFLKDNREKIEKILTFRIPYYVGPLARGNSRFAWMTRKSEETITPWNFEEVVDKGASAQSFIERMTNFDKNLPNEKVLPKHSLLYEYFTVYNELTKVKYVTEGMRKPAFLSGEQKKAIVDLLFKTNRKVTVKQLKEDYFKKIECFDSVEISGVEDRFNASLGTYHDLLKIIKDKDFLDNEENEDILEDIVLTLTLFEDREMIEERLKTYAHLFDDKVMKQLKRRRYTGWGRLSRKLINGIRDKQSGKTILDFLKSDGFANRNFMQLIHDDSLTFKEDIQKAQVSGQGDSLHEHIANLAGSPAIKKGILQTVKVVDELVKVMGRHKPENIVIEMARENQTTQKGQKNSRERMKRIEEGIKELGSDILKEYPVENTQLQNEKLYLYYLQNGRDMYVDQELDINRLSDYDVDAIVPQSFLKDDSIDNKVLTRSDKNRGKSDNVPSEEVVKKMKNYWRQLLNAKLITQRKFDNLTKAERGGLSELDKVGFIKRQLVETRQITKHVAQILDSRMNTKYDENDKLIREVRVITLKSKLVSDFRKDFQFYKVREINNYHHAHDAYLNAVVGTALIKKYPKLESEFVYGDYKVYDVRKMIAKSEQEIGKATAKYFFYSNIMNFFKTEITLANGEIRKRPLIETNGETGEIVWDKGRDFATVRKVLSMPQVNIVKKTEVQTGGFSKESILPKRNSDKLIARKKDWDPKKYGGFDSPTVAYSVLVVAKVEKGKSKKLKSVKELLGITIMERSSFEKDPIDFLEAKGYKEVRKDLIIKLPKYSLFELENGRKRMLASAGELQKGNELALPSKYVNFLYLASHYEKLKGSPEDNEQKQLFVEQHKHYLDEIIEQISEFSKRVILADANLDKVLSAYNKHRDKPIREQAENIIHLFTLTNLGAPAAFKYFDTTIDRKRYTSTKEVLDATLIHQSITGLYETRIDLSQLGGD

SEQ ID NO: 260 - protein, 15 aa, synthetic construct
  REGION 1..15: note = Description of Artificial Sequence: Synthetic peptide
IGLDIGTNSVGWAVI

SEQ ID NO: 261 - protein, 8 aa, synthetic construct
  REGION 1..8: note = Description of Artificial Sequence: Synthetic peptide
IVIEMARE

SEQ ID NO: 262 - protein, 27 aa, synthetic construct
  REGION 1..27: note = Description of Artificial Sequence: Synthetic peptide
DVDHIVPQSFLKDDSIDNKVLTRSDKN

SEQ ID NO: 263 - protein, 8 aa, synthetic construct
  REGION 1..8: note = Description of Artificial Sequence: Synthetic peptide
HHAHDAYL

SEQ ID NO: 264 - protein, 11 aa, synthetic construct
  REGION 1..11: note = Description of Artificial Sequence: Synthetic peptide
YGRKKRRQRRR

SEQ ID NO: 265 - protein, 12 aa, synthetic construct
  REGION 1..12: note = Description of Artificial Sequence: Synthetic peptide
RRQRRTSKLMKR

SEQ ID NO: 266 - protein, 27 aa, synthetic construct
  REGION 1..27: note = Description of Artificial Sequence: Synthetic peptide
GWTLNSAGYLLGKINLKALAALAKKIL

SEQ ID NO: 267 - protein, 33 aa, synthetic construct
  REGION 1..33: note = Description of Artificial Sequence: Synthetic polypeptide
KALAWEAKLAKALAKALAKHLAKALAKALKCEA

SEQ ID NO: 268 - protein, 16 aa, synthetic construct
  REGION 1..16: note = Description of Artificial Sequence: Synthetic peptide
RQIKIWFQNRRMKWKK

SEQ ID NO: 269 - protein, 9 aa, synthetic construct
  REGION 1..9: note = Description of Artificial Sequence: Synthetic peptide
RKKRRQRRR

SEQ ID NO: 270 - protein, 8 aa, synthetic construct
  REGION 1..8: note = Description of Artificial Sequence: Synthetic peptide
RKKRRQRR

SEQ ID NO: 271 - protein, 11 aa, synthetic construct
  REGION 1..11: note = Description of Artificial Sequence: Synthetic peptide
YARAAARQARA

SEQ ID NO: 272 - protein, 11 aa, synthetic construct
  REGION 1..11: note = Description of Artificial Sequence: Synthetic peptide
THRLPRRRRRR

SEQ ID NO: 273 - protein, 11 aa, synthetic construct
  REGION 1..11: note = Description of Artificial Sequence: Synthetic peptide
GGRRARRRRRR

SEQ ID NO: 274 - protein, 13 aa, synthetic construct
  REGION 1..13: note = Description of Artificial Sequence: Synthetic peptide
DAYPYDVPDYASL

SEQ ID NO: 275 - protein, 17 aa, synthetic construct
  REGION 1..17: note = Description of Artificial Sequence: Synthetic peptide
PKKKRKVEDPKKKRKVD

SEQ ID NO: 276 - DNA, 4206 bp, synthetic construct
  misc_feature 1..4206: note = Description of Artificial Sequence: Synthetic polynucleotide
  source 1..4206: mol_type = other DNA
atggacaagaagtacagcatcggcctggacatcggcaccaactctgtgggctgggccgtgatcaccgacgagtacaaggtgcccagcaagaaattcaaggtgctgggcaacaccgaccggcacagcatcaagaagaacctgatcggcgccctgctgttcgacagcggagaaacagccgaggccacccggctgaagagaaccgccagaagaagatacaccagacggaagaaccggatctgctatctgcaagagatcttcagcaacgagatggccaaggtggacgacagcttcttccacagactggaagagtccttcctggtggaagaggataagaagcacgagcggcaccccatcttcggcaacatcgtggacgaggtggcctaccacgagaagtaccccaccatctaccacctgagaaagaaactggtggacagcaccgacaaggccgacctgcggctgatctatctggccctggcccacatgatcaagttccggggccacttcctgatcgagggcgacctgaaccccgacaacagcgacgtggacaagctgttcatccagctggtgcagacctacaaccagctgttcgaggaaaaccccatcaacgccagcggcgtggacgccaaggccatcctgtctgccagactgagcaagagcagacggctggaaaatctgatcgcccagctgcccggcgagaagaagaatggcctgttcggcaacctgattgccctgagcctgggcctgacccccaacttcaagagcaacttcgacctggccgaggatgccaaactgcagctgagcaaggacacctacgacgacgacctggacaacctgctggcccagatcggcgaccagtacgccgacctgtttctggccgccaagaacctgtccgacgccatcctgctgagcgacatcctgagagtgaacaccgagatcaccaaggcccccctgagcgcctctatgatcaagagatacgacgagcaccaccaggacctgaccctgctgaaagctctcgtgcggcagcagctgcctgagaagtacaaagagattttcttcgaccagagcaagaacggctacgccggctacatcgatggcggagccagccaggaagagttctacaagttcatcaagcccatcctggaaaagatggacggcaccgaggaactgctcgtgaagctgaacagagaggacctgctgcggaagcagcggaccttcgacaacggcagcatcccccaccagatccacctgggagagctgcacgccattctgcggcggcaggaagatttttacccattcctgaaggacaaccgggaaaagatcgagaagatcctgaccttccgcatcccctactacgtgggccctctggccaggggaaacagcagattcgcctggatgaccagaaagagcgaggaaaccatcaccccctggaacttcgaggaagtggtggacaagggcgccagcgcccagagcttcatcgagcggatgaccaacttcgataagaacctgcccaacgagaaggtgctgcccaagcacagcctgctgtacgagtacttcaccgtgtacaacgagctgaccaaagtgaaatacgtgaccgagggaatgagaaagcccgccttcctgagcggcgagcagaaaaaagccatcgtggacctgctgttcaagaccaaccggaaagtgaccgtgaagcagctgaaagaggactacttcaagaaaatcgagtgcttcgactccgtggaaatctccggcgtggaagatcggttcaacgcctccctgggcacataccacgatctgctgaaaattatcaaggacaaggacttcctggacaatgaggaaaacgaggacattctggaagatatcgtgctgaccctgacactgtttgaggacagagagatgatcgaggaacggctgaaaacctatgcccacctgttcgacgacaaagtgatgaagcagctgaagcggcggagatacaccggctggggcaggctgagccggaagctgatcaacggcatccgggacaagcagtccggcaagacaatcctggatttcctgaagtccgacggcttcgccaacagaaacttcatgcagctgatccacgacgacagcctgacctttaaagaggacatccagaaagcccaggtgtccggccagggcgatagcctgcacgagcacattgccaatctggccggcagccccgccattaagaagggcatcctgcagacagtgaaggtggtggacgagctcgtgaaagtgatgggccggcacaagcccgagaacatcgtgatcgaaatggccagagagaaccagaccacccagaagggacagaagaacagccgcgagagaatgaagcggatcgaagagggcatcaaagagctgggcagccagatcctgaaagaacaccccgtggaaaacacccagctgcagaacgagaagctgtacctgtactacctgcagaatgggcgggatatgtacgtggaccaggaactggacatcaaccggctgtccgactacgatgtggaccatatcgtgcctcagagctttctgaaggacgactccatcgataacaaagtgctgactcggagcgacaagaaccggggcaagagcgacaacgtgccctccgaagaggtcgtgaagaagatgaagaactactggcgccagctgctgaatgccaagctgattacccagaggaagttcgacaatctgaccaaggccgagagaggcggcctgagcgaactggataaggccggcttcatcaagagacagctggtggaaacccggcagatcacaaagcacgtggcacagatcctggactcccggatgaacactaagtacgacgagaacgacaaactgatccgggaagtgaaagtgatcaccctgaagtccaagctggtgtccgatttccggaaggatttccagttttacaaagtgcgcgagatcaacaactaccaccacgcccacgacgcctacctgaacgccgtcgtgggaaccgccctgatcaaaaagtaccctaagctggaaagcgagttcgtgtacggcgactacaaggtgtacgacgtgcggaagatgatcgccaagagcgagcaggaaatcggcaaggctaccgccaagtacttcttctacagcaacatcatgaactttttcaagaccgagattaccctggccaacggcgagatccggaagcggcctctgatcgagacaaacggcgaaacaggcgagatcgtgtgggataagggccgggactttgccaccgtgcggaaagtgctgtctatgccccaagtgaatatcgtgaaaaagaccgaggtgcagacaggcggcttcagcaaagagtctatcctgcccaagaggaacagcgacaagctgatcgccagaaagaaggactgggaccctaagaagtacggcggcttcgacagccccaccgtggcctattctgtgctggtggtggccaaagtggaaaagggcaagtccaagaaactgaagagtgtgaaagagctgctggggatcaccatcatggaaagaagcagcttcgagaagaatcccatcgactttctggaagccaagggctacaaagaagtgaaaaaggacctgatcatcaagctgcctaagtactccctgttcgagctggaaaacggccggaagagaatgctggcctctgccggcgaactgcagaagggaaacgaactggccctgccctccaaatatgtgaacttcctgtacctggccagccactatgagaagctgaagggctcccccgaggataatgagcagaaacagctgtttgtggaacagcacaaacactacctggacgagatcatcgagcagatcagcgagttctccaagagagtgatcctggccgacgctaatctggacaaggtgctgagcgcctacaacaagcacagagacaagcctatcagagagcaggccgagaatatcatccacctgtttaccctgaccaatctgggagcccctgccgccttcaagtactttgacaccaccatcgaccggaagaggtacaccagcaccaaagaggtgctggacgccaccctgatccaccagagcatcaccggcctgtacgagacacggatcgacctgtctcagctgggaggcgacgcctatccctatgacgtgcccgattatgccagcctgggcagcggctcccccaagaaaaaacgcaaggtggaagatcctaagaaaaagcggaaagtggactga

SEQ ID NO: 277 - protein, 1401 aa, synthetic construct; identical to SEQ ID NO: 256
  REGION 1..1401: note = Description of Artificial Sequence: Synthetic polypeptide

SEQ ID NO: 278 - DNA, 50 bp, synthetic construct
  misc_feature 1..50: note = Description of Artificial Sequence: Synthetic oligonucleotide
  source 1..50: mol_type = other DNA
ttatatgaacataactcaatttgtaaaaaagggtattggggaattcatta

SEQ ID NO: 279 - DNA, 50 bp, synthetic construct
  misc_feature 1..50: note = Description of Artificial Sequence: Synthetic oligonucleotide
  source 1..50: mol_type = other DNA
taatgaattccccaatacccttttttacaaattgagttatgttcatataa

SEQ ID NO: 280 - RNA, 42 nt, synthetic construct
  misc_feature 1..42: note = Description of Artificial Sequence: Synthetic oligonucleotide
  source 1..42: mol_type = other RNA
ataactcaatttgtaaaaaagttttagagctatgctgttttg

SEQ ID NO: 281 - DNA, 27 bp, synthetic construct
  misc_feature 1..27: note = Description of Artificial Sequence: Synthetic oligonucleotide
  source 1..27: mol_type = other DNA
aacataactcaatttgtaaaaaagggt

SEQ ID NO: 282 - DNA, 27 bp, synthetic construct
  misc_feature 1..27: note = Description of Artificial Sequence: Synthetic oligonucleotide
  source 1..27: mol_type = other DNA
acccttttttacaaattgagttatgtt

SEQ ID NO: 283 - RNA, 25 nt, synthetic construct
  misc_feature 1..25: note = Description of Artificial Sequence: Synthetic oligonucleotide
  source 1..25: mol_type = other RNA
ataactcaatttgtaaaaaagtttt

SEQ ID NO: 284 - DNA, 23 bp, synthetic construct
  misc_feature 1..23: note = Description of Artificial Sequence: Synthetic oligonucleotide
  source 1..23: mol_type = other DNA
agcataactcaatttgtaaaaaa

SEQ ID NO: 285 - DNA, 23 bp, synthetic construct
  misc_feature 1..23: note = Description of Artificial Sequence: Synthetic oligonucleotide
  source 1..23: mol_type = other DNA
aacataactcaatctgtaaaaaa

SEQ ID NO: 286 - DNA, 23 bp, synthetic construct
  misc_feature 1..23: note = Description of Artificial Sequence: Synthetic oligonucleotide
  source 1..23: mol_type = other DNA
aacataactcaatttgaaaaaaa

SEQ ID NO: 287 - DNA, 23 bp, synthetic construct
  misc_feature 1..23: note = Description of Artificial Sequence: Synthetic oligonucleotide
  source 1..23: mol_type = other DNA
aacataactcaatttgttaaaaa

SEQ ID NO: 288 - DNA, 23 bp, synthetic construct
  misc_feature 1..23: note = Description of Artificial Sequence: Synthetic oligonucleotide
  source 1..23: mol_type = other DNA
aacataactcaatttgtataaaa

SEQ ID NO: 289 - DNA, 23 bp, synthetic construct
  misc_feature 1..23: note = Description of Artificial Sequence: Synthetic oligonucleotide
  source 1..23: mol_type = other DNA
aacataactcaatttgtaataaa

SEQ ID NO: 290 - DNA, 23 bp, synthetic construct
  misc_feature 1..23: note = Description of Artificial Sequence: Synthetic oligonucleotide
  source 1..23: mol_type = other DNA
aacataactcaatttgtaaataa

SEQ ID NO: 291 - DNA, 27 bp, synthetic construct
  misc_feature 1..27: note = Description of Artificial Sequence: Synthetic oligonucleotide
  source 1..27: mol_type = other DNA
aacataactcaatttgtaaaaaatggc

SEQ ID NO: 292 - DNA, 27 bp, synthetic construct
  misc_feature 1..27: note = Description of Artificial Sequence: Synthetic oligonucleotide
  source 1..27: mol_type = other DNA
gccattttttacaaattgagttatgtt

SEQ ID NO: 293 - DNA, 20 bp, synthetic construct
  misc_feature 1..20: note = Description of Artificial Sequence: Synthetic oligonucleotide
  source 1..20: mol_type = other DNA
tattgagttaaagtaaaaaa

SEQ ID NO: 294 - DNA, 20 bp, synthetic construct
  misc_feature 1..20: note = Description of Artificial Sequence: Synthetic oligonucleotide
  source 1..20: mol_type = other DNA
tattgagttattgtaaaaaa

SEQ ID NO: 295 - DNA, 20 bp, synthetic construct
  misc_feature 1..20: note = Description of Artificial Sequence: Synthetic oligonucleotide
  source 1..20: mol_type = other DNA
tattgagtatttgtaaaaaa

SEQ ID NO: 296 - DNA, 20 bp, synthetic construct
  misc_feature 1..20: note = Description of Artificial Sequence: Synthetic oligonucleotide
  source 1..20: mol_type = other DNA
tattgacaatttgtaaaaaa

SEQ ID NO: 297 - DNA, 20 bp, synthetic construct
  misc_feature 1..20: note = Description of Artificial Sequence: Synthetic oligonucleotide
  source 1..20: mol_type = other DNA
tattctcaatttgtaaaaaa

SEQ ID NO: 298 - DNA, 20 bp, synthetic construct
  misc_feature 1..20: note = Description of Artificial Sequence: Synthetic oligonucleotide
  source 1..20: mol_type = other DNA
taaactcaatttgtaaaaaa

SEQ ID NO: 299 - RNA, 62 nt, synthetic construct
  misc_feature 1..62: note = Description of Artificial Sequence: Synthetic oligonucleotide
  source 1..62: mol_type = other RNA
aaaaattaggtgcgcttggcgttttagagctagaaatagcaagttaaaataaggctagtccg

SEQ ID NO: 300 - RNA, 54 nt, synthetic construct
  misc_feature 1..54: note = Description of Artificial Sequence: Synthetic oligonucleotide
  source 1..54: mol_type = other RNA
aaaaattaggtgcgcttggcgttttagagctagaaatagcaagttaaaataagg

SEQ ID NO: 301 - DNA, 50 bp, synthetic construct
  misc_feature 1..50: note = Description of Artificial Sequence: Synthetic oligonucleotide
  source 1..50: mol_type = other DNA
tgcgctggttgatttcttcttgcgctttttgggtattggggaattcatta

SEQ ID NO: 302 - DNA, 50 bp, synthetic construct
  misc_feature 1..50: note = Description of Artificial Sequence: Synthetic oligonucleotide
  source 1..50: mol_type = other DNA
taatgaattccccaatacccaaaaagcgcaagaagaaatcaaccagcgca

SEQ ID NO: 303 - RNA, 42 nt, synthetic construct
  misc_feature 1..42: note = Description of Artificial Sequence: Synthetic oligonucleotide
  source 1..42: mol_type = other RNA
gatttcttcttgcgctttttgttttagagctatgctgttttg

SEQ ID NO: 304 - DNA, 50 bp, synthetic construct
  misc_feature 1..50: note = Description of Artificial Sequence: Synthetic oligonucleotide
  source 1..50: mol_type = other DNA
ggttatattaagtgccgaggaaaaattaggtgcgcttggctggcgcatta

SEQ ID NO: 305 - DNA, 50 bp, synthetic construct
  misc_feature 1..50: note = Description of Artificial Sequence: Synthetic oligonucleotide
  source 1..50: mol_type = other DNA
taatgcgccagccaagcgcacctaatttttcctcggcacttaatataacc

SEQ ID NO: 306 - RNA, 42 nt, synthetic construct
  misc_feature 1..42: note = Description of Artificial Sequence: Synthetic oligonucleotide
  source 1..42: mol_type = other RNA
aaaaattaggtgcgcttggcgttttagagctatgctgttttg

SEQ ID NO: 307 - DNA, 50 bp, synthetic construct
  misc_feature 1..50: note = Description of Artificial Sequence: Synthetic oligonucleotide
  source 1..50: mol_type = other DNA
tacgctggttgatttcttcttgcgcttttttggctttttcgagttcggct

SEQ ID NO: 308 - DNA, 50 bp, synthetic construct
  misc_feature 1..50: note = Description of Artificial Sequence: Synthetic oligonucleotide
  source 1..50: mol_type = other DNA
agccgaactcgaaaaagccaaaaaagcgcaagaagaaatcaaccagcgta

SEQ ID NO: 309 - RNA, 42 nt, synthetic construct; identical to SEQ ID NO: 303
  misc_feature 1..42: note = Description of Artificial Sequence: Synthetic oligonucleotide
  source 1..42: mol_type = other RNA

SEQ ID NO: 310 - DNA, 14 bp, synthetic construct
  misc_feature 1..14: note = Description of Artificial Sequence: Synthetic oligonucleotide
  source 1..14: mol_type = other DNA
taatgcgccagcca

SEQ ID NO: 311 - RNA, 42 nt, synthetic construct; identical to SEQ ID NO: 306
  misc_feature 1..42: note = Description of Artificial Sequence: Synthetic oligonucleotide
  source 1..42: mol_type = other RNA

SEQ ID NO: 312 - DNA, 25 bp, synthetic construct
  misc_feature 1..25: note = Description of Artificial Sequence: Synthetic oligonucleotide
  source 1..25: mol_type = other DNA
ataactcaatttgtaaaaaagggta

SEQ ID NO: 313 - DNA, 25 bp, synthetic construct
  misc_feature 1..25: note = Description of Artificial Sequence: Synthetic oligonucleotide
  source 1..25: mol_type = other DNA
ataactcaatttgtaaaaaagcgta

SEQ ID NO: 314 - DNA, 25 bp, synthetic construct
  misc_feature 1..25: note = Description of Artificial Sequence: Synthetic oligonucleotide
  source 1..25: mol_type = other DNA
ataactcaatttgtaaaaaagccta

SEQ ID NO: 315 - DNA, 26 bp, synthetic construct
  misc_feature 1..26: note = Description of Artificial Sequence: Synthetic oligonucleotide
  source 1..26: mol_type = other DNA
aaaaattaggtgcgcttggctggcgc

SEQ ID NO: 316 - DNA, 26 bp, synthetic construct
  misc_feature 1..26: note = Description of Artificial Sequence: Synthetic oligonucleotide
  source 1..26: mol_type = other DNA
aaaaattaggtgcgcttggctcgcgc

SEQ ID NO: 317 - DNA, 26 bp, synthetic construct
  misc_feature 1..26: note = Description of Artificial Sequence: Synthetic oligonucleotide
  source 1..26: mol_type = other DNA
aaaaattaggtgcgcttggctgccgc

SEQ ID NO: 318 - DNA, 26 bp, synthetic construct
  misc_feature 1..26: note = Description of Artificial Sequence: Synthetic oligonucleotide
  source 1..26: mol_type = other DNA
aaaaattaggtgcgcttggctggccc

SEQ ID NO: 319 - DNA, 26 bp, synthetic construct
  misc_feature 1..26: note = Description of Artificial Sequence: Synthetic oligonucleotide
  source 1..26: mol_type = other DNA
aaaaattaggtgcgcttggctccccc

SEQ ID NO: 320 - DNA, 21 bp, synthetic construct
  misc_feature 1..21: note = Description of Artificial Sequence: Synthetic oligonucleotide
  source 1..21: mol_type = other DNA
aaaaattaggtgcgcttggct

SEQ ID NO: 321 - RNA, 62 nt, synthetic construct
  misc_feature 1..62: note = Description of Artificial Sequence: Synthetic oligonucleotide
  source 1..62: mol_type = other RNA
gatttcttcttgcgctttttgttttagagctagaaatagcaagttaaaataaggctagtccg

SEQ ID NO: 322 - RNA, 54 nt, synthetic construct
  misc_feature 1..54: note = Description of Artificial Sequence: Synthetic oligonucleotide
  source 1..54: mol_type = other RNA
gatttcttcttgcgctttttgttttagagctagaaatagcaagttaaaataagg

SEQ ID NO: 323 - RNA, 62 nt, synthetic construct
  misc_feature 1..62: note = Description of Artificial Sequence: Synthetic oligonucleotide
  source 1..62: mol_type = other RNA
ataactcaatttgtaaaaaagttttagagctagaaatagcaagttaaaataaggctagtccg

SEQ ID NO: 324 - RNA, 54 nt, synthetic construct
  misc_feature 1..54: note = Description of Artificial Sequence: Synthetic oligonucleotide
  source 1..54: mol_type = other RNA
ataactcaatttgtaaaaaagttttagagctagaaatagcaagttaaaataagg

SEQ ID NO: 325 - DNA, 120 bp, synthetic construct
  misc_feature 1..120: note = Description of Artificial Sequence: Synthetic polynucleotide
  source 1..120: mol_type = other DNA
gtcccaattcttgttgaattagatggtgatgttaatgggcacaaattttctgtcagtggagagggtgaaggtgatgcaacatacggaaaacttacccttaaatttatttgcactactgga

SEQ ID NO: 326 - DNA, 120 bp, synthetic construct
  misc_feature 1..120: note = Description of Artificial Sequence: Synthetic polynucleotide
  source 1..120: mol_type = other DNA
tccagtagtgcaaataaatttaagggtaagttttccgtatgttgcatcaccttcaccctctccactgacagaaaatttgtgcccattaacatcaccatctaattcaacaagaattgggac

SEQ ID NO: 327 - DNA, 26 bp, synthetic construct
  misc_feature 1..26: note = Description of Artificial Sequence: Synthetic oligonucleotide
  source 1..26: mol_type = other DNA
ccaattcttgttgaattagatggtga

SEQ ID NO: 328 - DNA, 26 bp, synthetic construct
  misc_feature 1..26: note = Description of Artificial Sequence: Synthetic oligonucleotide
  source 1..26: mol_type = other DNA
aattagatggtgatgttaatgggcac

SEQ ID NO: 329 - DNA, 26 bp, synthetic construct
  misc_feature 1..26: note = Description of Artificial Sequence: Synthetic oligonucleotide
  source 1..26: mol_type = other DNA
aaattttctgtcagtggagagggtga

SEQ ID NO: 330 - DNA, 26 bp, synthetic construct
  misc_feature 1..26: note = Description of Artificial Sequence: Synthetic oligonucleotide
  source 1..26: mol_type = other DNA
catctaattcaacaagaattgggaca

SEQ ID NO: 331 - DNA, 26 bp, synthetic construct
  misc_feature 1..26: note = Description of Artificial Sequence: Synthetic oligonucleotide
  source 1..26: mol_type = other DNA
cagtagtgcaaataaatttaagggta

SEQ ID NO: 332 - RNA, 68 nt, synthetic construct
  misc_feature 1..68: note = Description of Artificial Sequence: Synthetic oligonucleotide
  source 1..68: mol_type = other RNA
ccaattcttgttgaattagatggtgagttttagagctagaaatagcaagttaaaataaggctagtccg

SEQ ID NO: 333 - RNA, 68 nt, synthetic construct
  misc_feature 1..68: note = Description of Artificial Sequence: Synthetic oligonucleotide
  source 1..68: mol_type = other RNA
aattagatggtgatgttaatgggcacgttttagagctagaaatagcaagttaaaataaggctagtccg

SEQ ID NO: 334 - RNA, 68 nt, synthetic construct
  misc_feature 1..68: note = Description of Artificial Sequence: Synthetic oligonucleotide
  source 1..68: mol_type = other RNA
aaattttctgtcagtggagagggtgagttttagagctagaaatagcaagttaaaataaggctagtccg

SEQ ID NO: 335 - RNA, 68 nt, synthetic construct
  misc_feature 1..68: note = Description of Artificial Sequence: Synthetic oligonucleotide
  source 1..68: mol_type = other RNA
catctaattcaacaagaattgggacagttttagagctagaaatagcaagttaaaataaggctagtccg

SEQ ID NO: 336 - RNA, 68 nt, synthetic construct
  misc_feature 1..68: note = Description of Artificial Sequence: Synthetic oligonucleotide
  source 1..68: mol_type = other RNA
cagtagtgcaaataaatttaagggtagttttagagctagaaatagcaagttaaaataaggctagtccg

SEQ ID NO: 337 - DNA, 50 bp, synthetic construct
  misc_feature 1..50: note = Description of Artificial Sequence: Synthetic oligonucleotide
  source 1..50: mol_type = other DNA
ggttatattaagtgccgaggaaaaattaggtgcgcttggctgccgcatta

SEQ ID NO: 338 - DNA, 50 bp, synthetic construct
  misc_feature 1..50: note = Description of Artificial Sequence: Synthetic oligonucleotide
  source 1..50: mol_type = other DNA
taatgcggcagccaagcgcacctaatttttcctcggcacttaatataacc

SEQ ID NO: 339 - RNA, 42 nt, synthetic construct; identical to SEQ ID NO: 306
  misc_feature 1..42: note = Description of Artificial Sequence: Synthetic oligonucleotide
  source 1..42: mol_type = other RNA

SEQ ID NO: 340 - DNA, 59 bp, synthetic construct
  misc_feature 1..59: note = Description of Artificial Sequence: Synthetic oligonucleotide
  source 1..59: mol_type = other DNA
gaaattaatacgactcactatagaaaacagcatagcaagttaaaataaagttaaaataa

SEQ ID NO: 341 - DNA, 25 bp, synthetic construct
  misc_feature 1..25: note = Description of Artificial Sequence: Synthetic oligonucleotide
  source 1..25: mol_type = other DNA
aaaaaaagcaccgactcggtgccac

SEQ ID NO: 342 - DNA, 66 bp, synthetic construct
  misc_feature 1..66: note = Description of Artificial Sequence: Synthetic oligonucleotide
  source 1..66: mol_type = other DNA
gaaattaatacgactcactatagggatttcttcttgcgctttttgttttagagctatgctgttttg

SEQ ID NO: 343 - DNA, 66 bp, synthetic construct
  misc_feature 1..66: note = Description of Artificial Sequence: Synthetic oligonucleotide
  source 1..66: mol_type = other DNA
caaaacagcatagctctaaaacaaaaagcgcaagaagaaatccctatagtgagtcgtattaatttc

SEQ ID NO: 344 - DNA, 66 bp, synthetic construct
  misc_feature 1..66: note = Description of Artificial Sequence: Synthetic oligonucleotide
  source 1..66: mol_type = other DNA
gaaattaatacgactcactataggataactcaatttgtaaaaaagttttagagctatgctgttttg

SEQ ID NO: 345 - DNA, 66 bp, synthetic construct
  misc_feature 1..66: note = Description of Artificial Sequence: Synthetic oligonucleotide
  source 1..66: mol_type = other DNA
caaaacagcatagctctaaaacttttttacaaattgagttatcctatagtgagtcgtattaatttc

SEQ ID NO: 346 - DNA, 51 bp, synthetic construct
  misc_feature 1..51: note = Description of Artificial Sequence: Synthetic oligonucleotide
  source 1..51: mol_type = other DNA
gaaattaatacgactcactatagatgatgagaaccgttgctacaataaggc

SEQ ID NO: 347 - DNA, 24 bp, synthetic construct
  misc_feature 1..24: note = Description of Artificial Sequence: Synthetic oligonucleotide
  source 1..24: mol_type = other DNA
aaataaacgatgccccttaaagca

SEQ ID NO: 348 - DNA, 68 bp, synthetic construct
  misc_feature 1..68: note = Description of Artificial Sequence: Synthetic oligonucleotide
  source 1..68: mol_type = other DNA
gaaattaatacgactcactatagatgataactcaatttgtaaaaaagttgtagctccctttctcattt

SEQ ID NO: 349 - DNA, 68 bp, synthetic construct
  misc_feature 1..68: note = Description of Artificial Sequence: Synthetic oligonucleotide
  source 1..68: mol_type = other DNA
aaatgagaaagggagctacaacttttttacaaattgagttatcatctatagtgagtcgtattaatttc

SEQ ID NO: 350 - DNA, 51 bp, synthetic construct
  misc_feature 1..51: note = Description of Artificial Sequence: Synthetic oligonucleotide
  source 1..51: mol_type = other DNA
gaaattaatacgactcactatagatgaaataacatagcaagttaaaataag

SEQ ID NO: 351 - DNA, 31 bp, synthetic construct
  misc_feature 1..31: note = Description of Artificial Sequence: Synthetic oligonucleotide
  source 1..31: mol_type = other DNA
aaaaaaagcgccgaaacagcgctacttaatt

SEQ ID NO: 352 - DNA, 68 bp, synthetic construct
  misc_feature 1..68: note = Description of Artificial Sequence: Synthetic oligonucleotide
  source 1..68: mol_type = other DNA
gaaattaatacgactcactatagatgataactcaatttgtaaaaaagttttagagctatgttattttg

SEQ ID NO: 353 - DNA, 68 bp, synthetic construct
  misc_feature 1..68: note = Description of Artificial Sequence: Synthetic oligonucleotide
  source 1..68: mol_type = other DNA
caaaataacatagctctaaaacttttttacaaattgagttatcatctatagtgagtcgtattaatttc

SEQ ID NO: 354 - DNA, 35 bp, synthetic construct
  misc_feature 1..35: note = Description of Artificial Sequence: Synthetic oligonucleotide
  source 1..35: mol_type = other DNA
atgcacctgcaggatgctgttaaataattgtatac

SEQ ID NO: 355 - DNA, 36 bp, synthetic construct
  misc_feature 1..36: note = Description of Artificial Sequence: Synthetic oligonucleotide
  source 1..36: mol_type = other DNA
atgcacggatccagctgctctaagtctactaaaacc

SEQ ID NO: 356 - DNA, 39 bp, synthetic construct
  misc_feature 1..39: note = Description of Artificial Sequence: Synthetic oligonucleotide
  source 1..39: mol_type = other DNA
atgcagggccggccgtgacagagagaaacttgattcaac

SEQ ID NO: 357 - DNA, 39 bp, synthetic construct
  misc_feature 1..39: note = Description of Artificial Sequence: Synthetic oligonucleotide
  source 1..39: mol_type = other DNA
atgcagggccggcccttcgtttaagtaaacatcaaagtg

SEQ ID NO: 358 - DNA, 59 bp, synthetic construct
  misc_feature 1..59: note = Description of Artificial Sequence: Synthetic oligonucleotide
  source 1..59: mol_type = other DNA
atgagcgataatagaataaagttatatgagcataactcaatttgtaaaaaagggtattg

SEQ ID NO: 359 - DNA, 59 bp, synthetic construct
  misc_feature 1..59: note = Description of Artificial Sequence: Synthetic oligonucleotide
  source 1..59: mol_type = other DNA
caatacccttttttacaaattgagttatgctcatataactttattctattatcgctcat

SEQ ID NO: 360 - DNA, 57 bp, synthetic construct
  misc_feature 1..57: note = Description of Artificial Sequence: Synthetic oligonucleotide
  source 1..57: mol_type = other DNA
gcgataatagaataaagttatatgaacataactcaatctgtaaaaaagggtattggg

SEQ ID NO: 361 - DNA, 57 bp, synthetic construct
  misc_feature 1..57: note = Description of Artificial Sequence: Synthetic oligonucleotide
  source 1..57: mol_type = other DNA
cccaatacccttttttacagattgagttatgttcatataactttattctattatcgc

SEQ ID NO: 362 - DNA, 40 bp, synthetic construct
  misc_feature 1..40: note = Description of Artificial Sequence: Synthetic oligonucleotide
  source 1..40: mol_type = other DNA
gaacataactcaatttgaaaaaaagggtattggggaattc

SEQ ID NO: 363 - DNA, 40 bp, synthetic construct
  misc_feature 1..40: note = Description of Artificial Sequence: Synthetic oligonucleotide
  source 1..40: mol_type = other DNA
gaattccccaataccctttttttcaaattgagttatgttc

SEQ ID NO: 364 - DNA, 40 bp, synthetic construct
  misc_feature 1..40: note = Description of Artificial Sequence: Synthetic oligonucleotide
  source 1..40: mol_type = other DNA
gaacataactcaatttgttaaaaagggtattggggaattc

SEQ ID NO: 365 - DNA, 40 bp, synthetic construct
  misc_feature 1..40: note = Description of Artificial Sequence: Synthetic oligonucleotide
  source 1..40: mol_type = other DNA
gaattccccaataccctttttaacaaattgagttatgttc

SEQ ID NO: 366 - DNA, 43 bp, synthetic construct
  misc_feature 1..43: note = Description of Artificial Sequence: Synthetic oligonucleotide
  source 1..43: mol_type = other DNA
gaacataactcaatttgtataaaagggtattggggaattcatt

SEQ ID NO: 367 - DNA, 43 bp, synthetic construct
  misc_feature 1..43: note = Description of Artificial Sequence: Synthetic oligonucleotide
  source 1..43: mol_type = other DNA
aatgaattccccaatacccttttatacaaattgagttatgttc

SEQ ID NO: 368 - DNA, 43 bp, synthetic construct
  misc_feature 1..43: note = Description of Artificial Sequence: Synthetic oligonucleotide
  source 1..43: mol_type = other DNA
gaacataactcaatttgtaataaagggtattggggaattcatt

SEQ ID NO: 369 - DNA, 43 bp, synthetic construct
  misc_feature 1..43: note = Description of Artificial Sequence: Synthetic oligonucleotide
  source 1..43: mol_type = other DNA
aatgaattccccaataccctttattacaaattgagttatgttc

SEQ ID NO: 370 - DNA, 40 bp, synthetic construct
  misc_feature 1..40: note = Description of Artificial Sequence: Synthetic oligonucleotide
  source 1..40: mol_type = other DNA
cataactcaatttgtaaataagggtattggggaattcatt

SEQ ID NO: 371 - DNA, 40 bp, synthetic construct
  misc_feature 1..40: note = Description of Artificial Sequence: Synthetic oligonucleotide
  source 1..40: mol_type = other DNA
aatgaattccccaatacccttatttacaaattgagttatg

SEQ ID NO: 372 - DNA, 46 bp, synthetic construct
  misc_feature 1..46: note = Description of Artificial Sequence: Synthetic oligonucleotide
  source 1..46: mol_type = other DNA
cataactcaatttgtaaaaaagcgtattggggaattcattataaag

SEQ ID NO: 373 - DNA, 46 bp, synthetic construct
  misc_feature 1..46: note = Description of Artificial Sequence: Synthetic oligonucleotide
  source 1..46: mol_type = other DNA
ctttataatgaattccccaatacgcttttttacaaattgagttatg

SEQ ID NO: 374 - DNA, 44 bp, synthetic construct
  misc_feature 1..44: note = Description of Artificial Sequence: Synthetic oligonucleotide
  source 1..44: mol_type = other DNA
cataactcaatttgtaaaaaagcctattggggaattcattataa

SEQ ID NO: 375 - DNA, 44 bp, synthetic construct
  misc_feature 1..44: note = Description of Artificial Sequence: Synthetic oligonucleotide
  source 1..44: mol_type = other DNA
ttataatgaattccccaataggcttttttacaaattgagttatg

SEQ ID NO: 376 - DNA, 38 bp, synthetic construct
  misc_feature 1..38: note = Description of Artificial Sequence: Synthetic oligonucleotide
  source 1..38: mol_type = other DNA
atgcagggccggccagtatcagcgtacttggatttggg

SEQ ID NO: 377 - DNA, 37 bp, synthetic construct
  misc_feature 1..37: note = Description of Artificial Sequence: Synthetic oligonucleotide
  source 1..37: mol_type = other DNA
atgcagggccggccttgtctcactcactctatttttg

SEQ ID NO: 378 - DNA, 30 bp, synthetic construct
  misc_feature 1..30: note = Description of Artificial Sequence: Synthetic oligonucleotide
  source 1..30: mol_type = other DNA
gatttcttgcgcttttttggctttttcgag

SEQ ID NO: 379 - DNA, 30 bp, synthetic construct
  misc_feature 1..30: note = Description of Artificial Sequence: Synthetic oligonucleotide
  source 1..30: mol_type = other DNA
gggatggcaatccatgggtcaaggtactag

SEQ ID NO: 380 - DNA, 20 bp, synthetic construct
  misc_feature 1..20: note = Description of Artificial Sequence: Synthetic oligonucleotide
  source 1..20: mol_type = other DNA
ggaacgaaaactcacgttaa

SEQ ID NO: 381 - DNA, 25 bp, synthetic construct
  misc_feature 1..25: note = Description of Artificial Sequence: Synthetic oligonucleotide
  source 1..25: mol_type = other DNA
tgagagtgtcttttcagatgctgtg

SEQ ID NO: 382 - DNA, 21 bp, synthetic construct
  misc_feature 1..21: note = Description of Artificial Sequence: Synthetic oligonucleotide
  source 1..21: mol_type = other DNA
agcggtatctgttccccaaaa

SEQ ID NO: 383 - DNA, 21 bp, synthetic construct
  misc_feature 1..21: note = Description of Artificial Sequence: Synthetic oligonucleotide
  source 1..21: mol_type = other DNA
gttaaaaaccacgtaaccaca

SEQ ID NO: 384 - RNA, 42 nt, synthetic construct; identical to SEQ ID NO: 303
  misc_feature 1..42: note = Description of Artificial Sequence: Synthetic oligonucleotide
  source 1..42: mol_type = other RNA

SEQ ID NO: 385 - RNA, 42 nt, synthetic construct; identical to SEQ ID NO: 280
  misc_feature 1..42: note = Description of Artificial Sequence: Synthetic oligonucleotide
  source 1..42: mol_type = other RNA

SEQ ID NO: 386 - RNA, 42 nt, synthetic construct; identical to SEQ ID NO: 306
  misc_feature 1..42: note = Description of Artificial Sequence: Synthetic oligonucleotide
  source 1..42: mol_type = other RNA

SEQ ID NO: 387 - RNA, 36 nt, synthetic construct
  misc_feature 1..36: note = Description of Artificial Sequence: Synthetic oligonucleotide
  source 1..36: mol_type = other RNA
ataactcaatttgtaaaaaagttttagagctatgct

SEQ ID NO: 388 - RNA, 32 nt, synthetic construct
  misc_feature 1..32: note = Description of Artificial Sequence: Synthetic oligonucleotide
  source 1..32: mol_type = other RNA
ataactcaatttgtaaaaaagttttagagcta

SEQ ID NO: 389 - RNA, 22 nt, synthetic construct
  misc_feature 1..22: note = Description of Artificial Sequence: Synthetic oligonucleotide
  source 1..22: mol_type = other RNA
ttgtaaaaaagttttagagcta

SEQ ID NO: 390 - RNA, 89 nt, synthetic construct
  misc_feature 1..89: note = Description of Artificial Sequence: Synthetic oligonucleotide
  source 1..89: mol_type = other RNA
gttggaaccattcaaaacagcatagcaagttaaaataaggctagtccgttatcaacttgaaaaagtggcaccgagtcggtgcttttttt

SEQ ID NO: 391 - RNA, 74 nt, synthetic construct
  misc_feature 1..74: note = Description of Artificial Sequence: Synthetic oligonucleotide
  source 1..74: mol_type = other RNA
aacagcatagcaagttaaaataaggctagtccgttatcaacttgaaaaagtggcaccgagtcggtgcttttttt

SEQ ID NO: 392 - RNA, 67 nt, synthetic construct
  misc_feature 1..67: note = Description of Artificial Sequence: Synthetic oligonucleotide
  source 1..67: mol_type = other RNA
tagcaagttaaaataaggctagtccgttatcaacttgaaaaagtggcaccgagtcggtgcttttttt

SEQ ID NO: 393 - RNA, 39 nt, synthetic construct
  misc_feature 1..39: note = Description of Artificial Sequence: Synthetic oligonucleotide
  source 1..39: mol_type = other RNA
aaacagcatagcaagttaaaataaggctagtccgttatc

SEQ ID NO: 394 - RNA, 30 nt, synthetic construct
  misc_feature 1..30: note = Description of Artificial Sequence: Synthetic oligonucleotide
  source 1..30: mol_type = other RNA
aaacagcatagcaagttaaaataaggctag

SEQ ID NO: 395 - RNA, 22 nt, synthetic construct
  misc_feature 1..22: note = Description of Artificial Sequence: Synthetic oligonucleotide
  source 1..22: mol_type = other RNA
aaacagcatagcaagttaaaat

SEQ ID NO: 396 - RNA, 31 nt, synthetic construct
  misc_feature 1..31: note = Description of Artificial Sequence: Synthetic oligonucleotide
  source 1..31: mol_type = other RNA
tagcaagttaaaataaggctagtccgttatc

SEQ ID NO: 397 - RNA, 26 nt, synthetic construct
  misc_feature 1..26: note = Description of Artificial Sequence: Synthetic oligonucleotide
  source 1..26: mol_type = other RNA
tagcaagttaaaataaggctagtccg

SEQ ID NO: 398 - RNA, 22 nt, synthetic construct
  misc_feature 1..22: note = Description of Artificial Sequence: Synthetic oligonucleotide
  source 1..22: mol_type = other RNA
tagcaagttaaaataaggctag

SEQ ID NO: 399 - RNA, 26 nt, synthetic construct
  misc_feature 1..26: note = Description of Artificial Sequence: Synthetic oligonucleotide
  source 1..26: mol_type = other RNA
gttggaaccattcaaaacagcatagc

SEQ ID NO: 400 - RNA, 62 nt, synthetic construct; identical to SEQ ID NO: 321
  misc_feature 1..62: note = Description of Artificial Sequence: Synthetic oligonucleotide
  source 1..62: mol_type = other RNA

SEQ ID NO: 401 - RNA, 54 nt, synthetic construct; identical to SEQ ID NO: 322
  misc_feature 1..54: note = Description of Artificial Sequence: Synthetic oligonucleotide
  source 1..54: mol_type = other RNA

SEQ ID NO: 402 - RNA, 62 nt, synthetic construct; identical to SEQ ID NO: 323
  misc_feature 1..62: note = Description of Artificial Sequence: Synthetic oligonucleotide
  source 1..62: mol_type = other RNA

SEQ ID NO: 403 - RNA, 54 nt, synthetic construct; identical to SEQ ID NO: 324
  misc_feature 1..54: note = Description of Artificial Sequence: Synthetic oligonucleotide
  source 1..54: mol_type = other RNA

SEQ ID NO: 404 - RNA, 62 nt, synthetic construct; identical to SEQ ID NO: 299
  misc_feature 1..62: note = Description of Artificial Sequence: Synthetic oligonucleotide
  source 1..62: mol_type = other RNA

SEQ ID NO: 405 - RNA, 54 nt, synthetic construct; identical to SEQ ID NO: 300
  misc_feature 1..54: note = Description of Artificial Sequence: Synthetic oligonucleotide
  source 1..54: mol_type = other RNA

SEQ ID NO: 406 - RNA, 62 nt, synthetic construct
  misc_feature 1..62: note = Description of Artificial Sequence: Synthetic oligonucleotide
  source 1..62: mol_type = other RNA
ccaattcttgttgaattagagttttagagctagaaatagcaagttaaaataaggctagtccg

SEQ ID NO: 407 - RNA, 62 nt, synthetic construct
  misc_feature 1..62: note = Description of Artificial Sequence: Synthetic oligonucleotide
  source 1..62: mol_type = other RNA
aattagatggtgatgttaatgttttagagctagaaatagcaagttaaaataaggctagtccg

SEQ ID NO: 408 - RNA, 62 nt, synthetic construct
  misc_feature 1..62: note = Description of Artificial Sequence: Synthetic oligonucleotide
  source 1..62: mol_type = other RNA
aaattttctgtcagtggagagttttagagctagaaatagcaagttaaaataaggctagtccg

SEQ ID NO: 409 - RNA, 62 nt, synthetic construct
  misc_feature 1..62: note = Description of Artificial Sequence: Synthetic oligonucleotide
  source 1..62: mol_type = other RNA
catctaattcaacaagaattgttttagagctagaaatagcaagttaaaataaggctagtccg

SEQ ID NO: 410 - RNA, 61 nt, synthetic construct
  misc_feature 1..61: note = Description of Artificial Sequence: Synthetic oligonucleotide
  source 1..61: mol_type = other RNA
cagtagtgcaaataaatttagttttagagctagaaatagcaagttaaaataaggctagccg

SEQ ID NO: 411 - DNA, 50 bp, synthetic construct; identical to SEQ ID NO: 302
  misc_feature 1..50: note = Description of Artificial Sequence: Synthetic oligonucleotide
  source 1..50: mol_type = other DNA

SEQ ID NO: 412 - DNA, 50 bp, synthetic construct; identical to SEQ ID NO: 301
  misc_feature 1..50: note = Description of Artificial Sequence: Synthetic oligonucleotide
  source 1..50: mol_type = other DNA

SEQ ID NO: 413 - DNA, 50 bp, synthetic construct; identical to SEQ ID NO: 279
  misc_feature 1..50: note = Description of Artificial Sequence: Synthetic oligonucleotide
  source 1..50: mol_type = other DNA

SEQ ID NO: 414 - DNA, 50 bp, synthetic construct; identical to SEQ ID NO: 278
  misc_feature 1..50: note = Description of Artificial Sequence: Synthetic oligonucleotide
  source 1..50: mol_type = other DNA

SEQ ID NO: 415 - DNA, 50 bp, synthetic construct; identical to SEQ ID NO: 305
  misc_feature 1..50: note = Description of Artificial Sequence: Synthetic oligonucleotide
  source 1..50: mol_type = other DNA

SEQ ID NO: 416 - DNA, 50 bp, synthetic construct; identical to SEQ ID NO: 304
  misc_feature 1..50: note = Description of Artificial Sequence: Synthetic oligonucleotide
  source 1..50: mol_type = other DNA

SEQ ID NO: 417 - DNA, 50 bp, synthetic construct
  misc_feature 1..50: note = Description of Artificial Sequence: Synthetic oligonucleotide
  source 1..50: mol_type = other DNA
taatgaattccccaataggcttttttacaaattgagttatgttcatataa

SEQ ID NO: 418 - DNA, 50 bp, synthetic construct
  misc_feature 1..50: note = Description of Artificial Sequence: Synthetic oligonucleotide
  source 1..50: mol_type = other DNA
ttatatgaacataactcaatttgtaaaaaagcctattggggaattcatta

SEQ ID NO: 419 - DNA, 50 bp, synthetic construct
  misc_feature 1..50: note = Description of Artificial Sequence: Synthetic oligonucleotide
  source 1..50: mol_type = other DNA
taatgaattcccgttatggcttttttacaaattgagttatgttcatataa

SEQ ID NO: 420 - DNA, 50 bp, synthetic construct
  misc_feature 1..50: note = Description of Artificial Sequence: Synthetic oligonucleotide
  source 1..50: mol_type = other DNA
ttatatgaacataactcaatttgtaaaaaagccataacgggaattcatta

SEQ ID NO: 421 - DNA, 50 bp, synthetic construct
  misc_feature 1..50: note = Description of Artificial Sequence: Synthetic oligonucleotide
  source 1..50: mol_type = other DNA
taatgcgcgagccaagcgcacctaatttttcctcggcacttaatataacc

SEQ ID NO: 422 - DNA, 50 bp, synthetic construct
  misc_feature 1..50: note = Description of Artificial Sequence: Synthetic oligonucleotide
  source 1..50: mol_type = other DNA
ggttatattaagtgccgaggaaaaattaggtgcgcttggctcgcgcatta

SEQ ID NO: 423 - DNA, 50 bp, synthetic construct; identical to SEQ ID NO: 338
  misc_feature 1..50: note = Description of Artificial Sequence: Synthetic oligonucleotide
  source 1..50: mol_type = other DNA

SEQ ID NO: 424 - DNA, 50 bp, synthetic construct; identical to SEQ ID NO: 337
  misc_feature 1..50: note = Description of Artificial Sequence: Synthetic oligonucleotide
  source 1..50: mol_type = other DNA

SEQ ID NO: 425 - DNA, 74 bp, synthetic construct
  misc_feature 1..74: note = Description of Artificial Sequence: Synthetic oligonucleotide
  source 1..74: mol_type = other DNA
tcagtcctcatctccctcaagcaggccccgctggtgcactgaagagccaccctgtggaaacactacatctgcaa

SEQ ID NO: 426 - DNA, 74 bp, synthetic construct
  misc_feature 1..74: note = Description of Artificial Sequence: Synthetic oligonucleotide
  source 1..74: mol_type = other DNA
ttgcagatgtagtgtttccacagggtggctcttcagtgcaccagcggggcctgcttgagggagatgaggactga

SEQ ID NO: 427 - DNA, 20 bp, synthetic construct
  misc_feature 1..20: note = Description of Artificial Sequence: Synthetic oligonucleotide
  source 1..20: mol_type = other DNA
tgtggaaacactacatctgc

SEQ ID NO: 428 - RNA, 62 nt, synthetic construct
  misc_feature 1..62: note = Description of Artificial Sequence: Synthetic oligonucleotide
  source 1..62: mol_type = other RNA
gcagatgtagtgtttccacagttttagagctagaaatagcaagttaaaataaggctagtccg

SEQ ID NO: 429 - RNA, 75 nt, synthetic construct
  misc_feature 1..75: note = Description of Artificial Sequence: Synthetic oligonucleotide
  source 1..75: mol_type = other RNA
gcagatgtagtgtttccacagttttagagctatgctgaaaagcatagcaagttaaaataaggctagtccgttatc

SEQ ID NO: 430 - RNA, 87 nt, synthetic construct
  misc_feature 1..87: note = Description of Artificial Sequence: Synthetic oligonucleotide
  source 1..87: mol_type = other RNA
gcagatgtagtgtttccacagttttagagctatgctgttttggaaacaaaacagcatagcaagttaaaataaggctagtccgttatc

SEQ ID NO: 431 - RNA, 86 nt, synthetic construct
  misc_feature 1..86: note = Description of Artificial Sequence: Synthetic oligonucleotide
  source 1..86: mol_type = other RNA
ggaaccattcaaaacagcatagcaagttaaaataaggctagtccgttatcaacttgaaaaagtggcaccgagtcggtgcttttttt

SEQ ID NO: 432 - RNA, 67 nt, synthetic construct; identical to SEQ ID NO: 392
  misc_feature 1..67: note = Description of Artificial Sequence: Synthetic oligonucleotide
  source 1..67: mol_type = other RNA

SEQ ID NO: 433 - RNA, 88 nt, unidentified
  source 1..88: mol_type = unassigned RNA; note = Streptococcus pyogenes
gttggaaccattcaaaacagcatagcaagttaaaataaggctagtccgttatcaacttgaaaaagtggcaccgagtcggtgctttttt

SEQ ID NO: 434 - RNA, 93 nt, unidentified
  source 1..93: mol_type = unassigned RNA; note = Listeria innocua
atattgttagtattcaaaataacatagcaagttaaaataaggctttgtccgttatcaacttttaattaagtagcgctgtttcggcgctttttt

SEQ ID NO: 435 - RNA, 104 nt, unidentified
  source 1..104: mol_type = unassigned RNA; note = Streptococcus mutans
tgttggaatcattcgaaacaacacagcaagttaaaataaggcagtgatttttaatccagtccgtacacaacttgaaaaagtgcgcaccgattcggtgctttttt

SEQ ID NO: 436 - RNA, 95 nt, unidentified
  source 1..95: mol_type = unassigned RNA; note = Streptococcus thermophilus
ttgtggtttgaaaccattcgaaacaacacagcgagttaaaataaggcttagtccgtactcaacttgaaaaggtggcaccgattcggtgttttttt

SEQ ID NO: 437 - RNA, 118 nt, unidentified
  source 1..118: mol_type = unassigned RNA; note = Streptococcus thermophilus
taataatagtgtaagggacgccttacacagttacttaaatcttgcagaagctacaaagataaggcttcatgccgaaatcaacaccctgtcattttatggcagggtgttttcgttattt

SEQ ID NO: 438 - RNA, 112 nt, Neisseria meningitidis
  source 1..112: mol_type = unassigned RNA
catattgtcgcactgcgaaatgagaaccgttgctacaataaggccgtctgaaaagatgtgccgcaacgctctgccccttaaagcttctgctttaaggggcatcgtttatttc

SEQ ID NO: 439 - RNA, 110 nt, Pasteurella multocida
  source 1..110: mol_type = unassigned RNA
gcatattgttgcactgcgaaatgagagacgttgctacaataaggcttctgaaaagaatgaccgtaacgctctgccccttgtgattcttaattgcaaggggcatcgttttt

SEQ ID NO: 440 - RNA, 115 nt, Mycoplasma mobile
  source 1..115: mol_type = unassigned RNA
tattatgtatttcgaaatacagatgtacagttaagaatacataagaatgatacatcactaaaaaaaggctttatgccgtaactactacttattttcaaaataagtagtttttttt

SEQ ID NO: 441 - RNA, 26 nt, synthetic construct
  misc_feature 1..26: note = Description of Artificial Sequence: Synthetic oligonucleotide
  source 1..26: mol_type = other RNA
tagcaagttaaaataaggctagtccg

SEQ ID NO: 442 - RNA, 36 nt, Streptococcus pyogenes
  source 1..36: mol_type = unassigned RNA
ttgttggaaccattcaaaacagcatagcaagttaaa

SEQ ID NO: 443 - RNA, 36 nt, Streptococcus mutans
  source 1..36: mol_type = unassigned RNA
gtgttggaatcattcgaaacaacacagcaagttaaa

SEQ ID NO: 444 - RNA, 36 nt, Streptococcus thermophilus
  source 1..36: mol_type = unassigned RNA
ggtttgaaaccattcgaaacaacacagcgagttaaa

SEQ ID NO: 445 - RNA, 36 nt, Streptococcus thermophilus
  source 1..36: mol_type = unassigned RNA
cttacacagttacttaaatcttgcagaagctacaaa

SEQ ID NO: 446 - RNA, 36 nt, Listeria innocua
  source 1..36: mol_type = unassigned RNA
atattgttagtattcaaaataacatagcaagttaaa

SEQ ID NO: 447 - RNA, 34 nt, Listeria innocua
  source 1..34: mol_type = unassigned RNA
attgttagtattcaaaataacatagcaagttaaa

SEQ ID NO: 448 - RNA, 36 nt, Treponema denticola
  source 1..36: mol_type = unassigned RNA
atttaagatccatcttaaattacacaacgagttcaa

SEQ ID NO: 449 - RNA, 36 nt, Neisseria meningitidis
  source 1..36: mol_type = unassigned RNA
attgtcgcactgcgaaatgagaaccgttgctacaat

SEQ ID NO: 450 - RNA, 38 nt, Neisseria meningitidis
  source 1..38: mol_type = unassigned RNA
atattgtcgcactgcgaaatgagaaccgttgctacaat

SEQ ID NO: 451 - RNA, 36 nt, Streptococcus gordonii; identical to SEQ ID NO: 445
  source 1..36: mol_type = unassigned RNA

SEQ ID NO: 452 - RNA, 36 nt, Bifidobacterium bifidum
  source 1..36: mol_type = unassigned RNA
atgatcaaggtcattgacctgacaggcataaattga

SEQ ID NO: 453 - RNA, 36 nt, Lactobacillus salivarius
  source 1..36: mol_type = unassigned RNA
ggttttgacctcattgatttaacattctgagttgaa

SEQ ID NO: 454 - RNA, 37 nt, Francisella tularensis
  source 1..37: mol_type = unassigned RNA
gtttcagttgttagattatttggtatgtacttgtgtt

SEQ ID NO: 455 - RNA, 37 nt, Francisella tularensis
  source 1..37: mol_type = unassigned RNA
attacagagcattaattatttggtacatttataattt

SEQ ID NO: 456 - RNA, 37 nt, Legionella pneumophila
  source 1..37: mol_type = unassigned RNA
atttcagggtatcgaaatttagatgatttctaattta

SEQ ID NO: 457 - RNA, 36 nt, Nitratifractor salsuginis
  source 1..36: mol_type = unassigned RNA
tgtaacagggtagggttttttgaggggtcttaaaat

SEQ ID NO: 458 - RNA, 36 nt, Butyrivibrio fibrisolvens
  source 1..36: mol_type = unassigned RNA
agtttctaatcacttaattttttcggacctactaaa

SEQ ID NO: 459 - RNA, 36 nt, Streptobacillus moniliformis
  source 1..36: mol_type = unassigned RNA
gattcacattattcaagtttactacagattctgtat

SEQ ID NO: 460 - RNA, 36 nt, Mycoplasma mobile
  source 1..36: mol_type = unassigned RNA
agttaagaatacataagaatgatacatcactaaaaa

SEQ ID NO: 461 - RNA, 44 nt, Capnocytophaga ochracea
  source 1..44: mol_type = unassigned RNA
attgtgaattgctttcaaattgtgcgacaaaagtaggtataata

SEQ ID NO: 462 - RNA, 36 nt, Acidovorax ebreus
  source 1..36: mol_type = unassigned RNA
attgcagcaacggctctcaccccggataaccacaat

SEQ ID NO: 463 - RNA, 36 nt, Wolinella succinogenes
  source 1..36: mol_type = unassigned RNA
atagccgctgcctactcagccatttagcgcagcgac

SEQ ID NO: 464 - RNA, 37 nt, Wolinella succinogenes
  source 1..37: mol_type = unassigned RNA
tttgttaaagctggatgggattattatagagtgttgc

SEQ ID NO: 465 - RNA, 37 nt, Wolinella succinogenes
  source 1..37: mol_type = unassigned RNA
tttcaaggcatcgaacggatttgctataaagtgttgc

SEQ ID NO: 466 - RNA, 36 nt, Prevotella ruminicola
  source 1..36: mol_type = unassigned RNA
ttttgcacacgtaagattcctacatcttatcacaat

SEQ ID NO: 467 - RNA, 48 nt, Fibrobacter succinogenes
  source 1..48: mol_type = unassigned RNA
attgtgaattgctttcagattatgaaaataatatagttaaaatttttg

SEQ ID NO: 468 - RNA, 36 nt, Campylobacter jejuni
  source 1..36: mol_type = unassigned RNA
attttatttcgattttaatcaaccctaaatttcaat

SEQ ID NO: 469 - RNA, 36 nt, Campylobacter jejuni
  source 1..36: mol_type = unassigned RNA
attttagtccctttttaaatttcttatgagattata

SEQ ID NO: 470 - RNA, 25 nt, Campylobacter jejuni
  source 1..25: mol_type = unassigned RNA
aagaaatttaaaaagggactaaaat

SEQ ID NO: 471 - RNA, 36 nt, Pasteurella multocida
  source 1..36: mol_type = unassigned RNA
attgtagcaacgtctctcatttcgcagtgcaacaat

SEQ ID NO: 472 - RNA, 36 nt, Rhodopseudomonas palustris
  source 1..36: mol_type = unassigned RNA
gccgtggctttcctaccgatttcccaccgcatgatt

SEQ ID NO: 473 - RNA, 36 nt, Olsenella uli
  source 1..36: mol_type = unassigned RNA
tctgaattaccagtcagaacgatactgcgagtcaaa

SEQ ID NO: 474 - RNA, 36 nt, Rhodospirillum rubrum
  source 1..36: mol_type = unassigned RNA
gttccatggccccgtcccacacgccatgatagagcg

SEQ ID NO: 475 - RNA, 36 nt, Rhodospirillum rubrum
  source 1..36: mol_type = unassigned RNA
aaacgggagaaccgtcccacacggccatggtagagt

SEQ ID NO: 476 - RNA, 36 nt, Dinoroseobacter shibae
  source 1..36: mol_type = unassigned RNA
ttaacggctcgaccgcgaattctgaacgtaaagaca

SEQ ID NO: 477 - RNA, 36 nt, Verminephrobacter eiseniae
  source 1..36: mol_type = unassigned RNA
ttagcgtccagagcgcatatcccagtgagatatccg

SEQ ID NO: 478 - RNA, 75 nt, Streptococcus pyogenes
  source 1..75: mol_type = unassigned RNA
aaacagcatagcaagttaaaataaggctagtccgttatcaacttgaaaaagtggcaccgagtcggtgcttttttt

SEQ ID NO: 479 - RNA, 77 nt, Listeria innocua
  source 1..77: mol_type = unassigned RNA
aaataacatagcaagttaaaataaggctttgtccgttatcaacttttaattaagtagcgctgtttcggcgctttttt

SEQ ID NO: 480 - RNA, 73 nt, synthetic construct
  misc_feature 1..73: note = Description of Artificial Sequence: Synthetic oligonucleotide
  source 1..73: mol_type = other RNA
aacagcatagcaagttaaaataaggctagtccgttatcaacttgaaaaagtggcaccgagtcggtgctttttt

SEQ ID NO: 481 - RNA, 33 nt, unidentified
  source 1..33: mol_type = unassigned RNA; note = Francisella novicida
tataaatgtaccaaataattaatgctctgtaat

SEQ ID NO: 482 - RNA, 74 nt, Campylobacter jejuni
  source 1..74: mol_type = unassigned RNA
aagaaatttaaaaagggactaaaataaagagtttgcgggactctgcggggttacaatcccctaaaaccgctttt

SEQ ID NO: 483 - RNA, 96 nt, unidentified
  source 1..96: mol_type = unassigned RNA; note = Francisella novicida
atctaaaattataaatgtaccaaataattaatgctctgtaatcatttaaaagtattttgaacggacctctgtttgacacgtctgaataactaaaaa

SEQ ID NO: 484 - RNA, 109 nt, Streptococcus thermophilus
  source 1..109: mol_type = unassigned RNA
tgtaagggacgccttacacagttacttaaatcttgcagaagctacaaagataaggcttcatgccgaaatcaacaccctgtcattttatggcagggtgttttcgttattt

SEQ ID NO: 485 - RNA, 110 nt, Mycoplasma mobile
  source 1..110: mol_type = unassigned RNA
tgtatttcgaaatacagatgtacagttaagaatacataagaatgatacatcactaaaaaaaggctttatgccgtaactactacttattttcaaaataagtagtttttttt

SEQ ID NO: 486 - RNA, 92 nt, Listeria innocua
  source 1..92: mol_type = unassigned RNA
attgttagtattcaaaataacatagcaagttaaaataaggctttgtccgttatcaacttttaattaagtagcgctgtttcggcgcttttttt

SEQ ID NO: 487 - RNA, 89 nt, Streptococcus pyogenes; identical to SEQ ID NO: 390
  source 1..89: mol_type = unassigned RNA

SEQ ID NO: 488 - RNA, 107 nt, Streptococcus mutans
  source 1..107: mol_type = unassigned RNA
gttggaatcattcgaaacaacacagcaagttaaaataaggcagtgatttttaatccagtccgtacacaacttgaaaaagtgcgcaccgattcggtgcttttttattt

SEQ ID NO: 489 - RNA, 96 nt, Streptococcus thermophilus
  source 1..96: mol_type = unassigned RNA
ttgtggtttgaaaccattcgaaacaacacagcgagttaaaataaggcttagtccgtactcaacttgaaaaggtggcaccgattcggtgtttttttt

SEQ ID NO: 490 - RNA, 102 nt, Neisseria meningitidis
  source 1..102: mol_type = unassigned RNA
acatattgtcgcactgcgaaatgagaaccgttgctacaataaggccgtctgaaaagatgtgccgcaacgctctgccccttaaagcttctgctttaaggggca

SEQ ID NO: 491 - RNA, 110 nt, Pasteurella multocida; identical to SEQ ID NO: 439
  source 1..110: mol_type = unassigned RNA

SEQ ID NO: 492 - RNA, 37 nt, unidentified
  source 1..37: mol_type = unassigned RNA; note = Francisella novicida
aacacaagtacataccaaataatctaacaactgaaac

SEQ ID NO: 493 - RNA, 37 nt, unidentified
  source 1..37: mol_type = unassigned RNA; note = Francisella novicida
aaattataaatgtaccaaataattaatgctctgtaat

SEQ ID NO: 494 - RNA, 37 nt, Wolinella succinogenes; identical to SEQ ID NO: 465
  source 1..37: mol_type = unassigned RNA

SEQ ID NO: 495 - RNA, 37 nt, Wolinella succinogenes; identical to SEQ ID NO: 464
  source 1..37: mol_type = unassigned RNA

SEQ ID NO: 496 - RNA, 37 nt, unidentified
  misc_feature 1..37: note = Description of Unknown: gamma Proteobacterium oligonucleotide
  source 1..37: mol_type = unassigned RNA
atttcagtgtatagaatgttgggatgcattctgaata

SEQ ID NO: 497 - RNA, 37 nt, unidentified
  misc_feature 1..37: note = Description of Unknown: gamma Proteobacterium oligonucleotide
  source 1..37: mol_type = unassigned RNA
ataacaagggagtatttgctggaataagctctgaaac

SEQ ID NO: 498 - RNA, 37 nt, Sutterella wadsworthensis
  source 1..37: mol_type = unassigned RNA
gtttccaagcaatagctcgtggcgttatgatttctgt

SEQ ID NO: 499 - RNA, 37 nt, Sutterella wadsworthensis
  source 1..37: mol_type = unassigned RNA
ggtgatttcctatagctcatagcgttatgatctctaa

SEQ ID NO: 500 - RNA, 37 nt, Legionella pneumophila; identical to SEQ ID NO: 456
  source 1..37: mol_type = unassigned RNA

SEQ ID NO: 501 - RNA, 36 nt, Listeria innocua; identical to SEQ ID NO: 446
  source 1..36: mol_type = unassigned RNA

SEQ ID NO: 502 - RNA, 36 nt, Streptococcus thermophilus; identical to SEQ ID NO: 444
  source 1..36: mol_type = unassigned RNA

SEQ ID NO: 503 - RNA, 36 nt, Streptococcus mutans; identical to SEQ ID NO: 443
  source 1..36: mol_type = unassigned RNA

SEQ ID NO: 504 - RNA, 36 nt, Streptococcus pyogenes; identical to SEQ ID NO: 442
  source 1..36: mol_type = unassigned RNA

SEQ ID NO: 505 - RNA, 36 nt, Fusobacterium nucleatum
  source 1..36: mol_type = unassigned RNA
atttttaatttaagtaataaaaaatggagcatatac

SEQ ID NO: 506 - RNA, 36 nt, Filifactor alocis
  source 1..36: mol_type = unassigned RNA
agttgactaccatatgagattacactacacggttca

SEQ ID NO: 507 - RNA, 36 nt, Treponema denticola; identical to SEQ ID NO: 448
  source 1..36: mol_type = unassigned RNA

SEQ ID NO: 508 - RNA, 36 nt, Solobacterium moorei
  source 1..36: mol_type = unassigned RNA
cttataccagtaagataatttacatagtaagttcaa

SEQ ID NO: 509 - RNA, 36 nt, Veillonella atypica
  source 1..36: mol_type = unassigned RNA
gttttggaggtttacagaattacactacgagttcaa

SEQ ID NO: 510 - RNA, 36 nt, Finegoldia magna
  source 1..36: mol_type = unassigned RNA
gtttaatacctatatgagattacatcatgagttcaa

SEQ ID NO: 511 - RNA, 36 nt, Olsenella uli; identical to SEQ ID NO: 473
  source 1..36: mol_type = unassigned RNA

SEQ ID NO: 512 - RNA, 36 nt, Lactobacillus rhamnosus
  source 1..36: mol_type = unassigned RNA
caacttgaattgattgatctgacatctacgagttga

SEQ ID NO: 513 - RNA, 36 nt, Lactobacillus gasseri
  source 1..36: mol_type = unassigned RNA
tgattagatttcattgatctaacagccatctaaaac

SEQ ID NO: 514 - RNA, 36 nt, Lactobacillus gasseri
  source 1..36: mol_type = unassigned RNA
acactaaactttattgatctaacaaccagatttaaa

SEQ ID NO: 515 - RNA, 36 nt, Oenococcus kitaharae
  source 1..36: mol_type = unassigned RNA
gggttctacctcattgatctgacacacagcattgaa

SEQ ID NO: 516 - RNA, 36 nt, Bifidobacterium bifidum; identical to SEQ ID NO: 452
  source 1..36: mol_type = unassigned RNA

SEQ ID NO: 517 - RNA, 36 nt, Staphylococcus pseudintermedius
  source 1..36: mol_type = unassigned RNA
gttttacttctttctaaataaacatagttaagttaa

SEQ ID NO: 518 - RNA, 36 nt, Eubacterium rectale
  source 1..36: mol_type = unassigned RNA
attttatagtcacgtaaatttttcagatctactaaa

SEQ ID NO: 519 - RNA, 38 nt, Enterococcus faecalis
  source 1..38: mol_type = unassigned RNA
attttactgataagaaattattgagaatctacaaaaat

SEQ ID NO: 520 - RNA, 36 nt, Streptococcus thermophilus; identical to SEQ ID NO: 445
  source 1..36: mol_type = unassigned RNA

SEQ ID NO: 521 - RNA, 36 nt, Staphylococcus lugdunensis
  source 1..36: mol_type = unassigned RNA
cttgtacttatacctaaaattacagaatctactgaa

SEQ ID NO: 522 - RNA, 36 nt, Eubacterium dolichum
  source 1..36: mol_type = unassigned RNA
atcataatctagcaaaagtttatatgatctaacaaa

SEQ ID NO: 523 - RNA, 36 nt, Mycoplasma mobile; identical to SEQ ID NO: 460
  source 1..36: mol_type = unassigned RNA

SEQ ID NO: 524 - RNA, 36 nt, Mycoplasma ovipneumoniae
  source 1..36: mol_type = unassigned RNA
attttactctagtaagaaattgtcgcacaaaaataa

SEQ ID NO: 525 - RNA, 36 nt, Mycoplasma gallisepticum
  source 1..36: mol_type = unassigned RNA
attattgcttacacaattattgtcgtgctaaaataa

SEQ ID NO: 526 - RNA, 36 nt, Mycoplasma canis
  source 1..36: mol_type = unassigned RNA
attattgtttacccaaatattgtacatcctaaatca

SEQ ID NO: 527 - RNA, 36 nt, Mycoplasma synoviae
  source 1..36: mol_type = unassigned RNA
tacttacttaacaaaataattgtacgattccaaaat

SEQ ID NO: 528 - RNA, 36 nt, Aminomonas paucivorans
  source 1..36: mol_type = unassigned RNA
gccttccctccctgccgaaggagcagatcctctcct

SEQ ID NO: 529 - RNA, 36 nt, Clostridium perfringens
  source 1..36: mol_type = unassigned RNA
ttatagtaactagttaaactctcgatatgctatacc

SEQ ID NO: 530 - RNA, 36 nt, Clostridium cellulolyticum
  source 1..36: mol_type = unassigned RNA
attatagcaacaattcaggctccgatatgccataat

SEQ ID NO: 531 - RNA, 36 nt, Acidovorax ebreus; identical to SEQ ID NO: 462
  source 1..36: mol_type = unassigned RNA

SEQ ID NO: 532 - RNA, 36 nt, Neisseria meningitidis; identical to SEQ ID NO: 449
  source 1..36: mol_type = unassigned RNA

SEQ ID NO: 533 - RNA, 36 nt, Pasteurella multocida
  source 1..36: mol_type = unassigned RNA
attgttgcactgcgaaatgagagacgttgctacaat

SEQ ID NO: 534 - RNA, 36 nt, unidentified
  misc_feature 1..36: note = Description of Unknown: phylotype Rs-D17 oligonucleotide
  source 1..36: mol_type = unassigned RNA
tttgtaacttatctgagagaggatggttattataat

SEQ ID NO: 535 - RNA, 36 nt, Wolinella succinogenes; identical to SEQ ID NO: 463
  source 1..36: mol_type = unassigned RNA

SEQ ID NO: 536 - RNA, 36 nt, Campylobacter jejuni
  source 1..36: mol_type = unassigned RNA
ataatacaaaaatcatttttttaaacaaacataaac

SEQ ID NO: 537 - RNA, 36 nt, Campylobacter jejuni
  source 1..36: mol_type = unassigned RNA
tataatctcataagaaatttaaaaagggactaaaat

SEQ ID NO: 538 - RNA, 36 nt, Helicobacter mustelae
  source 1..36: mol_type = unassigned RNA
gtatttgtcaataaatatactttataatggcaagat

SEQ ID NO: 539 - RNA, 36 nt, Roseburia intestinalis
  source 1..36: mol_type = unassigned RNA
ttgtaataacctaattatcacttggtatgatataat

SEQ ID NO: 540 - RNA, 36 nt, Lactobacillus coryniformis
  source 1..36: mol_type = unassigned RNA
ttttattctatagtaagttttcagctaaaatagatc

SEQ ID NO: 541 - RNA, 36 nt, Rhodopseudomonas palustris; identical to SEQ ID NO: 472
  source 1..36: mol_type = unassigned RNA

SEQ ID NO: 542 - RNA, 36 nt, unidentified
  misc_feature 1..36: note = Candidatus Puniceispirillum marinum
  source 1..36: mol_type = unassigned RNA; note = Puniceispirillum marinum
taaccataggctcctcaatcaccagagtgttattgc

SEQ ID NO: 543 - RNA, 36 nt, Verminephrobacter eiseniae; identical to SEQ ID NO: 477
  source 1..36: mol_type = unassigned RNA

SEQ ID NO: 544 - RNA, 36 nt, Ralstonia syzygii
  source 1..36: mol_type = unassigned RNA
gttagtagcaaagcgcaattcccgatctgctggaaa

SEQ ID NO: 545 - RNA, 36 nt, unidentified
  misc_feature 1..36: note = B510
  source 1..36: mol_type = unassigned RNA; note = Azospirillum sp.
ttaacggctggacccccgatccccatcgaatttcca

SEQ ID NO: 546 - RNA, 36 nt, Dinoroseobacter shibae; identical to SEQ ID NO: 476
  source 1..36: mol_type = unassigned RNA

SEQ ID NO: 547 - RNA, 36 nt, Rhodospirillum rubrum; identical to SEQ ID NO: 474
  source 1..36: mol_type = unassigned RNA

SEQ ID NO: 548 - RNA, 36 nt, Rhodospirillum rubrum; identical to SEQ ID NO: 475
  source 1..36: mol_type = unassigned RNA

SEQ ID NO: 549 - RNA, 36 nt, unidentified
  misc_feature 1..36: note = strain Buddy
  source 1..36: mol_type = unassigned RNA; note = Spirochaeta sp.
attagagataatcgctggtttttgttaagatataac

SEQ ID NO: 550 - RNA, 36 nt, Prevotella ruminicola; identical to SEQ ID NO: 466
  source 1..36: mol_type = unassigned RNA

SEQ ID NO: 551 - RNA, 36 nt, Flavobacterium columnare
  source 1..36: mol_type = unassigned RNA
agataaaattattctaatctttaatcttatcacaat

SEQ ID NO: 552 - RNA, 36 nt, Parvibaculum lavamentivorans
  source 1..36: mol_type = unassigned RNA
cttgcgaaaagcgaccgcctctcgatttgctacaga

SEQ ID NO: 553 - RNA, 44 nt, Capnocytophaga ochracea; identical to SEQ ID NO: 461
  source 1..44: mol_type = unassigned RNA

SEQ ID NO: 554 - RNA, 48 nt, Fibrobacter succinogenes; identical to SEQ ID NO: 467
  source 1..48: mol_type = unassigned RNA

SEQ ID NO: 555 - RNA, 36 nt, Nitratifractor salsuginis; identical to SEQ ID NO: 457
  source 1..36: mol_type = unassigned RNA

SEQ ID NO: 556 - RNA, 36 nt, Akkermansia muciniphila
  source 1..36: mol_type = unassigned RNA
cttatacgggaactccacgataaggcattttacatg

SEQ ID NO: 557 - RNA, 88 nt, synthetic construct
  misc_feature 1..88: note = Description of Artificial Sequence: Synthetic oligonucleotide
  source 1..88: mol_type = other RNA
ttggaaccattcaaaacagcatagcaagttaaaataaggctagtccgttatcaacttgaaaaagtggcaccgagtcggtgcttttttt

SEQ ID NO: 558 - RNA, 77 nt, synthetic construct
  misc_feature 1..77: note = Description of Artificial Sequence: Synthetic oligonucleotide
  source 1..77: mol_type = other RNA
caaaacagcatagcaagttaaaataaggctagtccgttatcaacttgaaaaagtggcaccgagtcggtgcttttttt

SEQ ID NO: 559 - RNA, 61 nt, synthetic construct
  misc_feature 1..61: note = Description of Artificial Sequence: Synthetic oligonucleotide
  source 1..61: mol_type = other RNA
caaaacagcatagcaagttaaaataaggctagtccgttatcaacttgaaaaagtttttttt

SEQ ID NO: 560 - RNA, 44 nt, synthetic construct
  misc_feature 1..44: note = Description of Artificial Sequence: Synthetic oligonucleotide
  source 1..44: mol_type = other RNA
caaaacagcatagcaagttaaaataaggctagtccgtttttttt

SEQ ID NO: 561 - RNA, 72 nt, synthetic construct
  misc_feature 1..72: note = Description of Artificial Sequence: Synthetic oligonucleotide
  source 1..72: mol_type = other RNA
caaaacagcatagcaagttaaaataaggctagtccggttcactgccgtataggcagctaagaaatttttttt

SEQ ID NO: 562 - RNA, 14 nt, synthetic construct
  misc_feature 1..14: note = Description of Artificial Sequence: Synthetic oligonucleotide
  source 1..14: mol_type = other RNA
tagcaagttaaaat

SEQ ID NO: 563 - RNA, 102 nt, synthetic construct
  misc_feature 1..102: note = Description of Artificial Sequence: Synthetic polynucleotide
  misc_difference 1..80: note = modified_base - a, c, u or g
  misc_difference 1..80: note = misc_feature - This region may encompass anywhere from 12 to 80 nucleotides; wherein some positions may be absent
  source 1..102: mol_type = other RNA
nnnnnnnnnnnnnnnnnnnnnnnnnnnnnnnnnnnnnnnnnnnnnnnnnnnnnnnnnnnnnnnnnnnnnnnnnnnnnnnngttttagagctatgctgttttg

SEQ ID NO: 564 - RNA, 102 nt, synthetic construct
  misc_feature 1..102: note = Description of Artificial Sequence: Synthetic polynucleotide
  misc_difference 1..80: note = modified_base - a, c, u or g
  misc_difference 1..80: note = misc_feature - This region may encompass anywhere from 12 to 80 nucleotides; wherein some positions may be absent
  source 1..102: mol_type = other RNA
nnnnnnnnnnnnnnnnnnnnnnnnnnnnnnnnnnnnnnnnnnnnnnnnnnnnnnnnnnnnnnnnnnnnnnnnnnnnnnnngttttagagctatgttattttg

SEQ ID NO: 565 - RNA, 92 nt, unidentified
  misc_feature 1..92: note = Description of Unknown: Exemplary polynucleotide
  misc_difference 1..80: note = modified_base - a, c, u or g
  misc_difference 1..80: note = misc_feature - This region may encompass anywhere from 12 to 80 nucleotides; wherein some positions may be absent
  source 1..92: mol_type = unassigned RNA
nnnnnnnnnnnnnnnnnnnnnnnnnnnnnnnnnnnnnnnnnnnnnnnnnnnnnnnnnnnnnnnnnnnnnnnnnnnnnnnngttttagagcta

SEQ ID NO: 566 - RNA, 152 nt, synthetic construct
  misc_feature 1..152: note = Description of Artificial Sequence: Synthetic polynucleotide
  misc_difference 37..116: note = modified_base - a, c, u or g
  misc_difference 37..116: note = misc_feature - This region may encompass anywhere from 12 to 80 nucleotides; wherein some positions may be absent
  source 1..152: mol_type = other RNA
gttttagagctatgctgttttgaatggtcccaaaacnnnnnnnnnnnnnnnnnnnnnnnnnnnnnnnnnnnnnnnnnnnnnnnnnnnnnnnnnnnnnnnnnnnnnnnnnnnnnnnngttttagagctatgctgttttgaatggtcccaaaac

SEQ ID NO: 567 - RNA, 188 nt, synthetic construct
  misc_feature 1..188: note = Description of Artificial Sequence: Synthetic polynucleotide
  misc_difference 37..116: note = modified_base - a, c, u or g
  misc_difference 37..116: note = misc_feature - This region may encompass anywhere from 12 to 80 nucleotides; wherein some positions may be absent
  source 1..188: mol_type = other RNA
gttttagagctatgctgttttgaatggtcccaaaacnnnnnnnnnnnnnnnnnnnnnnnnnnnnnnnnnnnnnnnnnnnnnnnnnnnnnnnnnnnnnnnnnnnnnnnnnnnnnnnngttttagagctatgctgttttgaatggtcccaaaacgttttagagctatgctgttttgaatggtcccaaaac

SEQ ID NO: 568 - RNA, 22 nt, unidentified
  misc_feature 1..22: note = Description of Unknown: Exemplary polynucleotide
  source 1..22: mol_type = unassigned RNA
gttttagagctatgctgttttg

SEQ ID NO: 569 - RNA, 36 nt, Streptococcus pyogenes
  source 1..36: mol_type = unassigned RNA
gttttagagctatgctgttttgaatggtcccaaaac

SEQ ID NO: 570 - RNA, 36 nt, Pasteurella multocida
  source 1..36: mol_type = unassigned RNA
gttgtagttccctctctcatttcgcagtgctacaat

SEQ ID NO: 571 - RNA, 36 nt, Mycoplasma mobile
  source 1..36: mol_type = unassigned RNA
gttttggtgtagtatcattcttatgtattcttaaac

SEQ ID NO: 572 - RNA, 37 nt, unidentified
  source 1..37: mol_type = unassigned RNA; note = Francisella novicida
gtttcagttgctgaattatttggtaaactactgttag

SEQ ID NO: 573 - RNA, 33 nt, unidentified
  source 1..33: mol_type = unassigned RNA; note = Francisella novicida
gtttcagttgctgaattatttggtaaactactg

SEQ ID NO: 574 - RNA, 36 nt, Streptococcus mutans
  source 1..36: mol_type = unassigned RNA
gttttagagctgtgttgtttcgaatggttccaaaac

SEQ ID NO: 575 - RNA, 36 nt, Streptococcus thermophilus; identical to SEQ ID NO: 574
  source 1..36: mol_type = unassigned RNA

SEQ ID NO: 576 - RNA, 36 nt, Streptococcus thermophilus
  source 1..36: mol_type = unassigned RNA
gtttttgtactctcaagatttaagtaactgtacaac

SEQ ID NO: 577 - RNA, 36 nt, Listeria innocua
  source 1..36: mol_type = unassigned RNA
gttttagagctatgttattttgaatgctaacaaaac

SEQ ID NO: 578 - RNA, 36 nt, Treponema denticola
  source 1..36: mol_type = unassigned RNA
gtttgagagttgtgtaatttaagatggatctcaaac

SEQ ID NO: 579 - RNA, 36 nt, Neisseria meningitidis
  source 1..36: mol_type = unassigned RNA
gttgtagctccctttctcatttcgcagtgctacaat

SEQ ID NO: 580 - RNA, 36 nt, Streptococcus gordonii; identical to SEQ ID NO: 576
  source 1..36: mol_type = unassigned RNA

SEQ ID NO: 581 - RNA, 35 nt, Bifidobacterium bifidum
  source 1..35: mol_type = unassigned RNA
gtttcaatgcctgtcagatcaatgactttgaccac

SEQ ID NO: 582 - RNA, 36 nt, Lactobacillus salivarius
  source 1..36: mol_type = unassigned RNA
gtttcagaagtatgttaaatcaataaggttaagacc

SEQ ID NO: 583 - RNA, 37 nt, unidentified
  source 1..37: mol_type = unassigned RNA; note = Francisella novicida
ctaacagtagtttaccaaataattcagcaactgaaac

SEQ ID NO: 584 - RNA, 37 nt, unidentified; identical to SEQ ID NO: 583
  source 1..37: mol_type = unassigned RNA; note = Francisella novicida

SEQ ID NO: 585 - RNA, 37 nt, Legionella pneumophila
  source 1..37: mol_type = unassigned RNA
ccaataatccctcatctaaaaatccaaccactgaaac

SEQ ID NO: 586 - RNA, 36 nt, Nitratifractor salsuginis
  source 1..36: mol_type = unassigned RNA
gttttaagacccctcaaaaccccaccctgttacaat

SEQ ID NO: 587 - RNA, 36 nt, Butyrivibrio fibrisolvens
  source 1..36: mol_type = unassigned RNA
gttttagtacccgggaaaattaagtgattggaaaac

SEQ ID NO: 588 - RNA, 36 nt, Streptobacillus moniliformis
  source 1..36: mol_type = unassigned RNA
gatacagattcttggtaaatttgaataatgtgaatg

SEQ ID NO: 589 - RNA, 36 nt, Mycoplasma mobile; identical to SEQ ID NO: 571
  source 1..36: mol_type = unassigned RNA

SEQ ID NO: 590 - RNA, 44 nt, Capnocytophaga ochracea
  source 1..44: mol_type = unassigned RNA
tgttatcaatcgcaaaactacaaaatttgaaagcaattcacaac

SEQ ID NO: 591 - RNA, 36 nt, Acidovorax ebreus
  source 1..36: mol_type = unassigned RNA
agtgtagctatccggggtgagagagggagctacaac

SEQ ID NO: 592 - RNA, 36 nt, Wolinella succinogenes
  source 1..36: mol_type = unassigned RNA
attatagcgaggaatggctgagtaggcggctataac

SEQ ID NO: 593 - RNA, 37 nt, Wolinella succinogenes
  source 1..37: mol_type = unassigned RNA
gcaacactttatagcaaatccgcttagcctgtgaaac

SEQ ID NO: 594 - RNA, 37 nt, Wolinella succinogenes; identical to SEQ ID NO: 593
  source 1..37: mol_type = unassigned RNA

SEQ ID NO: 595 - RNA, 36 nt, Prevotella ruminicola
  source 1..36: mol_type = unassigned RNA
gttgtggtttgatgtaggaaaggaatgatatacaac

SEQ ID NO: 596 - RNA, 48 nt, Fibrobacter succinogenes
  source 1..48: mol_type = unassigned RNA
gttgttattgcactagtaaaactagaaaatctgaaagcaattcacaac

SEQ ID NO: 597 - RNA, 36 nt, Campylobacter jejuni
  source 1..36: mol_type = unassigned RNA
attttaccataaagaaatttaaaaagggactaaaac

SEQ ID NO: 598 - RNA, 36 nt, Campylobacter jejuni
  source 1..36: mol_type = unassigned RNA
gttttagtccctttttaaatttctttatggtaaaat

SEQ ID NO: 599 - RNA, 36 nt, Pasteurella multocida
  source 1..36: mol_type = unassigned RNA
attgtagcactgcgaaatgagagagggaactacaac

SEQ ID NO: 600 - RNA, 36 nt, Rhodopseudomonas palustris
  source 1..36: mol_type = unassigned RNA
agcctaccacggggaaatcggtagggaagccacggc

SEQ ID NO: 601 - RNA, 36 nt, Olsenella uli
  source 1..36: mol_type = unassigned RNA
gttttggggcagtgtcgttttgactggtaatcaaac

SEQ ID NO: 602 - RNA, 36 nt, Rhodospirillum rubrum
  source 1..36: mol_type = unassigned RNA
actctaccatggcggtgtgggacggggccatggaac

SEQ ID NO: 603 - RNA, 36 nt, Rhodospirillum rubrum; identical to SEQ ID NO: 602
  source 1..36: mol_type = unassigned RNA

SEQ ID NO: 604 - RNA, 36 nt, Dinoroseobacter shibae
  source 1..36: mol_type = unassigned RNA
agtttagctgttcagaattcggggtccagccgcaac

SEQ ID NO: 605 - RNA, 36 nt, Verminephrobacter eiseniae
  source 1..36: mol_type = unassigned RNA
attgtagctcactgggatatgcgcactggccggaac

SEQ ID NO: 606 - RNA, 37 nt, unidentified; identical to SEQ ID NO: 572
  source 1..37: mol_type = unassigned RNA; note = Francisella novicida

SEQ ID NO: 607 - RNA, 37 nt, unidentified; identical to SEQ ID NO: 572
  source 1..37: mol_type = unassigned RNA; note = Francisella novicida

SEQ ID NO: 608 - RNA, 37 nt, Wolinella succinogenes; identical to SEQ ID NO: 593
  source 1..37: mol_type = unassigned RNA

SEQ ID NO: 609 - RNA, 37 nt, Wolinella succinogenes; identical to SEQ ID NO: 593
  source 1..37: mol_type = unassigned RNA

SEQ ID NO: 610 - RNA, 37 nt, unidentified
  misc_feature 1..37: note = Description of Unknown: gamma Proteobacterium oligonucleotide
  source 1..37: mol_type = unassigned RNA
gtttcagagcttatcccaacaaaccaacagctgaaac

SEQ ID NO: 611 - RNA, 37 nt, unidentified; identical to SEQ ID NO: 610
  misc_feature 1..37: note = Description of Unknown: gamma Proteobacterium oligonucleotide
  source 1..37: mol_type = unassigned RNA

SEQ ID NO: 612 - RNA, 37 nt, Sutterella wadsworthensis
  source 1..37: mol_type = unassigned RNA
gcgaagatcataacgctacgagctatagcactgaaac

SEQ ID NO: 613 - RNA, 37 nt, Sutterella wadsworthensis; identical to SEQ ID NO: 612
  source 1..37: mol_type = unassigned RNA

SEQ ID NO: 614 - RNA, 37 nt, Legionella pneumophila; identical to SEQ ID NO: 585
  source 1..37: mol_type = unassigned RNA

SEQ ID NO: 615 - RNA, 36 nt, Listeria innocua; identical to SEQ ID NO: 577
  source 1..36: mol_type = unassigned RNA

SEQ ID NO: 616 - RNA, 36 nt, Streptococcus thermophilus; identical to SEQ ID NO: 574
  source 1..36: mol_type = unassigned RNA

SEQ ID NO: 617 - RNA, 36 nt, Streptococcus mutans; identical to SEQ ID NO: 574
  source 1..36: mol_type = unassigned RNA

SEQ ID NO: 618 - RNA, 36 nt, Streptococcus pyogenes; identical to SEQ ID NO: 569
  source 1..36: mol_type = unassigned RNA

SEQ ID NO: 619 - RNA, 36 nt, Fusobacterium nucleatum
  source 1..36: mol_type = unassigned RNA
gtttgagagtaatgttattttaaatagattcaaaac

SEQ ID NO: 620 - RNA, 36 nt, Filifactor alocis
  source 1..36: mol_type = unassigned RNA
gtttgagagtagtgtaatttcatatggtagtcaaac

SEQ ID NO: 621 - RNA, 36 nt, Treponema denticola; identical to SEQ ID NO: 578
  source 1..36: mol_type = unassigned RNA

SEQ ID NO: 622 - RNA, 36 nt, Solobacterium moorei
  source 1..36: mol_type = unassigned RNA
gtttgagaactatgtaaattatgctggtagcaaaac

SEQ ID NO: 623 - RNA, 36 nt, Veillonella atypica
  source 1..36: mol_type = unassigned RNA
gtttgcgagtagtgtaattctgtaaatctctaaaac

SEQ ID NO: 624 - RNA, 36 nt, Finegoldia magna
  source 1..36: mol_type = unassigned RNA
gtttgagaatgatgtaatttcatataggtattaaac

SEQ ID NO: 625 - RNA, 36 nt, Olsenella uli; identical to SEQ ID NO: 601
  source 1..36: mol_type = unassigned RNA

SEQ ID NO: 626 - RNA, 36 nt, Lactobacillus rhamnosus
  source 1..36: mol_type = unassigned RNA
gtctcaggtagatgtcagatcaatcagttcaagagc

SEQ ID NO: 627 - RNA, 36 nt, Lactobacillus gasseri
  source 1..36: mol_type = unassigned RNA
gttttagatggttgttagatcaataaggtttagatc

SEQ ID NO: 628 - RNA, 36 nt, Lactobacillus gasseri; identical to SEQ ID NO: 627
  source 1..36: mol_type = unassigned RNA

SEQ ID NO: 629 - RNA, 36 nt, Oenococcus kitaharae
  source 1..36: mol_type = unassigned RNA
gcttcagatgtgtgtcagatcaatgaggtagaaccc

SEQ ID NO: 630 - RNA, 36 nt, Bifidobacterium bifidum
  source 1..36: mol_type = unassigned RNA
gtttcagatgcctgtcagatcaatgactttgaccac

SEQ ID NO: 631 - RNA, 36 nt, Staphylococcus pseudintermedius
  source 1..36: mol_type = unassigned RNA
gttttagcactatgtttatttagaaagaggtaaaac

SEQ ID NO: 632 - RNA, 36 nt, Eubacterium rectale
  source 1..36: mol_type = unassigned RNA
attttagtaactgaataatttacgtgactgtaaaac

SEQ ID NO: 633 - RNA, 36 nt, Enterococcus faecalis
  source 1..36: mol_type = unassigned RNA
gtttttgtattctcaataatttcttatcagtaaaac

SEQ ID NO: 634 - RNA, 36 nt, Streptococcus thermophilus; identical to SEQ ID NO: 576
  source 1..36: mol_type = unassigned RNA

SEQ ID NO: 635 - RNA, 36 nt, Staphylococcus lugdunensis
  source 1..36: mol_type = unassigned RNA
gttttagtactctgtaattttaggtataagtgatac

SEQ ID NO: 636 - RNA, 36 nt, Eubacterium dolichum
  source 1..36: mol_type = unassigned RNA
gttttgttaccatatggatttttgctagattaagac

SEQ ID NO: 637 - RNA, 36 nt, Mycoplasma mobile; identical to SEQ ID NO: 571
  source 1..36: mol_type = unassigned RNA

SEQ ID NO: 638 - RNA, 36 nt, Mycoplasma ovipneumoniae
  source 1..36: mol_type = unassigned RNA
gtttttgtgctgtacaatttcttactagagtaaaac

SEQ ID NO: 639 - RNA, 36 nt, Mycoplasma gallisepticum
  source 1..36: mol_type = unassigned RNA
gttttagcactgtacaatacttgtgtaagcaataac

SEQ ID NO: 640 - RNA, 36 nt, Mycoplasma canis
  source 1..36: mol_type = unassigned RNA
gttttagtgttgtacaatatttgggtaaacaataac

SEQ ID NO: 641 - RNA, 36 nt, Mycoplasma synoviae
  source 1..36: mol_type = unassigned RNA
gttttggggttgtacaattattttgttaagtaaaac

SEQ ID NO: 642 - RNA, 36 nt, Aminomonas paucivorans
  source 1..36: mol_type = unassigned RNA
agcatagcatttcggagtgcggcagggagctatgac

SEQ ID NO: 643 - RNA, 36 nt, Clostridium perfringens
  source 1..36: mol_type = unassigned RNA
attatagcatatcgagaatttactaggaactataac

SEQ ID NO: 644 - RNA, 36 nt, Clostridium cellulolyticum
  source 1..36: mol_type = unassigned RNA
attatagcatatcggagcctgaattggagctataac

SEQ ID NO: 645 - RNA, 36 nt, Acidovorax ebreus; identical to SEQ ID NO: 591
  source 1..36: mol_type = unassigned RNA

SEQ ID NO: 646 - RNA, 36 nt, Neisseria meningitidis; identical to SEQ ID NO: 579
  source 1..36: mol_type = unassigned RNA

SEQ ID NO: 647 - RNA, 36 nt, Pasteurella multocida; identical to SEQ ID NO: 570
  source 1..36: mol_type = unassigned RNA

SEQ ID NO: 648 - RNA, 36 nt, unidentified
  misc_feature 1..36: note = Description of Unknown: phylotypeRs-D oligonucleotide
  source 1..36: mol_type = unassigned RNA
gttatagtttccttcctctctcagatgtgctataat

SEQ ID NO: 649 - RNA, 36 nt, Wolinella succinogenes; identical to SEQ ID NO: 592
  source 1..36: mol_type = unassigned RNA

SEQ ID NO: 650 - RNA, 36 nt, Campylobacter jejuni; identical to SEQ ID NO: 598
  source 1..36: mol_type = unassigned RNA

SEQ ID NO: 651 - RNA, 36 nt, Campylobacter jejuni; identical to SEQ ID NO: 598
  source 1..36: mol_type = unassigned RNA

SEQ ID NO: 652 - RNA, 36 nt, Helicobacter mustelae
  source 1..36: mol_type = unassigned RNA
attttagcataaacatatttatgaagtggctaaaac

SEQ ID NO: 653 - RNA, 36 nt, Roseburia intestinalis
  source 1..36: mol_type = unassigned RNA
attataccataccaagtgataacagggaattacaac

SEQ ID NO: 654 - RNA, 36 nt, Lactobacillus coryniformis
  source 1..36: mol_type = unassigned RNA
gatctattttagctgaaaactgaaggaatcaatagc

SEQ ID NO: 655 - RNA, 36 nt, Rhodopseudomonas palustris; identical to SEQ ID NO: 600
  source 1..36: mol_type = unassigned RNA

SEQ ID NO: 656 - RNA, 36 nt, unidentified
  misc_feature 1..36: note = Candidatus Puniceispirillum marinum
  source 1..36: mol_type = unassigned RNA; note = Puniceispirillum marinum
agtatagcactctggtgattgagagcctagagcaac

SEQ ID NO: 657 - RNA, 36 nt, Verminephrobacter eiseniae; identical to SEQ ID NO: 605
  source 1..36: mol_type = unassigned RNA

SEQ ID NO: 658 - RNA, 36 nt, Ralstonia syzygii
  source 1..36: mol_type = unassigned RNA
aggttagcagatcgggaattgcgctctggctacaac

SEQ ID NO: 659 - RNA, 36 nt, unidentified
  misc_feature 1..36: note = B510
  source 1..36: mol_type = unassigned RNA; note = Azospirillum sp.
agtgtagccgatggggatcgggggtccagccgcaac

SEQ ID NO: 660 - RNA, 36 nt, Dinoroseobacter shibae; identical to SEQ ID NO: 604
  source 1..36: mol_type = unassigned RNA

SEQ ID NO: 661 - RNA, 36 nt, Rhodospirillum rubrum; identical to SEQ ID NO: 602
  source 1..36: mol_type = unassigned RNA

SEQ ID NO: 662 - RNA, 36 nt, Rhodospirillum rubrum; identical to SEQ ID NO: 602
  source 1..36: mol_type = unassigned RNA

SEQ ID NO: 663 - RNA, 36 nt, unidentified
  misc_feature 1..36: note = strain Buddy
  source 1..36: mol_type = unassigned RNA; note = Spirochaeta sp.
ggtcaatcttaacaaaaatcagcggtcatccccaac

SEQ ID NO: 664 - RNA, 36 nt, Prevotella ruminicola; identical to SEQ ID NO: 595
  source 1..36: mol_type = unassigned RNA

SEQ ID NO: 665 - RNA, 36 nt, Flavobacterium columnare
  source 1..36: mol_type = unassigned RNA
gttgtggtttgattaaagattagaaaacacgatatt

SEQ ID NO: 666 - RNA, 36 nt, Parvibaculum lavamentivorans
  source 1..36: mol_type = unassigned RNA
agagtagcaaatcgagagacggccgcaatccgcagc

SEQ ID NO: 667 - RNA, 44 nt, Capnocytophaga ochracea; identical to SEQ ID NO: 590
  source 1..44: mol_type = unassigned RNA

SEQ ID NO: 668 - RNA, 48 nt, Fibrobacter succinogenes; identical to SEQ ID NO: 596
  source 1..48: mol_type = unassigned RNA

SEQ ID NO: 669 - RNA, 36 nt, Nitratifractor salsuginis; identical to SEQ ID NO: 586
  source 1..36: mol_type = unassigned RNA

SEQ ID NO: 670 - RNA, 36 nt, Akkermansia muciniphila
  source 1..36: mol_type = unassigned RNA
gttgtactgtgccttattttggattcaaggcaaaac

SEQ ID NO: 671 - RNA, 44 nt, synthetic construct
  misc_feature 1..44: note = Description of Artificial Sequence: Synthetic oligonucleotide
  source 1..44: mol_type = other RNA
gttttagagctagaaatagcaagttaaaataaggctagtccgtt

SEQ ID NO: 672 - RNA, 60 nt, synthetic construct
  misc_feature 1..60: note = Description of Artificial Sequence: Synthetic oligonucleotide
  misc_difference 13..17: note = modified_base - a, c, u or g
  source 1..60: mol_type = other RNA
gttttagagctannnnntagcaagttaaaataagttaaaataaggctagtccgttatcaa

SEQ ID NO: 673 - RNA, 68 nt, synthetic construct
  misc_feature 1..68: note = Description of Artificial Sequence: Synthetic oligonucleotide
  source 1..68: mol_type = other RNA
gttttagagctatgctgaaaagcatagcaagttaaaaataagttaaaataaggctagtccgttatcaa

SEQ ID NO: 674 - RNA, 69 nt, synthetic construct
  misc_feature 1..69: note = Description of Artificial Sequence: Synthetic oligonucleotide
  source 1..69: mol_type = other RNA
gttttagagctatgctgttttggaaacaaaacagcatagcaagttaaaataaggctagtccgttatcaa

SEQ ID NO: 675 - RNA, 70 nt, synthetic construct
  misc_feature 1..70: note = Description of Artificial Sequence: Synthetic oligonucleotide
  source 1..70: mol_type = other RNA
gttttagagctagttttagagctagaaatagcaagttaaaattagcaagttaaaataaggctagtccgtt

SEQ ID NO: 676 - RNA, 70 nt, synthetic construct
  misc_feature 1..70: note = Description of Artificial Sequence: Synthetic oligonucleotide
  source 1..70: mol_type = other RNA
gttttagagctatagcaagttaaaatgaaagttttagagctatagcaagttaaaataaggctagtccgtt

SEQ ID NO: 677 - RNA, 74 nt, synthetic construct
  misc_feature 1..74: note = Description of Artificial Sequence: Synthetic oligonucleotide
  source 1..74: mol_type = other RNA
gttttagagctagaaatagcaagttaaaatgttttagagctagaaatagcaagttaaaataaggctagtccgtt

SEQ ID NO: 678 - RNA, 119 nt, synthetic construct
  misc_feature 1..119: note = Description of Artificial Sequence: Synthetic polynucleotide
  source 1..119: mol_type = other RNA
gttttagagctatgctgttttggaaacaaaacagcatagcaagttaaaatgttttagagctatgctgttttggaaacaaaacagcatagcaagttaaaataaggctagtccgttatcaa

SEQ ID NO: 679 - RNA, 12 nt, synthetic construct
  misc_feature 1..12: note = Description of Artificial Sequence: Synthetic oligonucleotide
  source 1..12: mol_type = other RNA
gttttagagcta

SEQ ID NO: 680 - RNA, 218 nt, synthetic construct
  misc_feature 1..218: note = Description of Artificial Sequence: Synthetic polynucleotide
  misc_difference 1..80: note = modified_base - a, c, u or g
  misc_difference 1..80: note = misc_feature - This region may encompass anywhere from 12 to 80 nucleotides; wherein some positions may be absent
  misc_difference 93..192: note = modified_base - a, c, u or g
  misc_difference 93..192: note = misc_feature - This region may encompass anywhere from 3 to 100 nucleotides; wherein some positions may be absent
  source 1..218: mol_type = other RNA
nnnnnnnnnnnnnnnnnnnnnnnnnnnnnnnnnnnnnnnnnnnnnnnnnnnnnnnnnnnnnnnnnnnnnnnnnnnnnnnngttttagagctannnnnnnnnnnnnnnnnnnnnnnnnnnnnnnnnnnnnnnnnnnnnnnnnnnnnnnnnnnnnnnnnnnnnnnnnnnnnnnnnnnnnnnnnnnnnnnnnnnntagcaagttaaaataaggctagtccg

SEQ ID NO: 681 - RNA, 219 nt, synthetic construct
  misc_feature 1..219: note = Description of Artificial Sequence: Synthetic polynucleotide
  misc_difference 1..80: note = modified_base - a, c, u or g
  misc_difference 1..80: note = misc_feature - This region may encompass anywhere from 12 to 80 nucleotides; wherein some positions may be absent
  misc_difference 93..192: note = modified_base - a, c, u or g
  misc_difference 93..192: note = misc_feature - This region may encompass anywhere from 3 to 100 nucleotides; wherein some positions may be absent
  source 1..219: mol_type = other RNA
nnnnnnnnnnnnnnnnnnnnnnnnnnnnnnnnnnnnnnnnnnnnnnnnnnnnnnnnnnnnnnnnnnnnnnnnnnnnnnnngttttagagctannnnnnnnnnnnnnnnnnnnnnnnnnnnnnnnnnnnnnnnnnnnnnnnnnnnnnnnnnnnnnnnnnnnnnnnnnnnnnnnnnnnnnnnnnnnnnnnnnnntagcaagttaaaataaggctttgtccg

SEQ ID NO: 682 - RNA, 163 nt, synthetic construct
  misc_feature 1..163: note = Description of Artificial Sequence: Synthetic polynucleotide
  misc_difference 1..80: note = modified_base - a, c, u or g
  misc_difference 1..80: note = misc_feature - This region may encompass anywhere from 12 to 80 nucleotides; wherein some positions may be absent
  source 1..163: mol_type = other RNA
nnnnnnnnnnnnnnnnnnnnnnnnnnnnnnnnnnnnnnnnnnnnnnnnnnnnnnnnnnnnnnnnnnnnnnnnnnnnnnnngttttagagctagaaatagcaagttaaaataaggctagtccgttatcaacttgaaaaagtggcaccgagtcggtgcttttttt

SEQ ID NO: 683 - RNA, 39 nt, synthetic construct
  misc_feature 1..39: note = Description of Artificial Sequence: Synthetic oligonucleotide
  source 1..39: mol_type = other RNA
atcaacttgaaaaagtggcaccgagtcggtgcttttttt

SEQ ID NO: 684 - RNA, 33 nt, synthetic construct
  misc_feature 1..33: note = Description of Artificial Sequence: Synthetic oligonucleotide
  source 1..33: mol_type = other RNA
aaaatcaaaggatcttcttgagatccttttttt

SEQ ID NO: 685 - RNA, 34 nt, synthetic construct
  misc_feature 1..34: note = Description of Artificial Sequence: Synthetic oligonucleotide
  source 1..34: mol_type = other RNA
cgccgaaaaccccgcttcggcggggttttgccgc

SEQ ID NO: 686 - RNA, 34 nt, synthetic construct
  misc_feature 1..34: note = Description of Artificial Sequence: Synthetic oligonucleotide
  source 1..34: mol_type = other RNA
cgcaaaaaaccccgcttcggcggggttttttcgc

SEQ ID NO: 687 - RNA, 39 nt, synthetic construct
  misc_feature 1..39: note = Description of Artificial Sequence: Synthetic oligonucleotide
  source 1..39: mol_type = other RNA
aaaaaaaaaccccgcccctgacagggcggggtttttttt

SEQ ID NO: 688 - RNA, 40 nt, synthetic construct
  misc_feature 1..40: note = Description of Artificial Sequence: Synthetic oligonucleotide
  source 1..40: mol_type = other RNA
cgcaaaaaaccccgcccctgacagggcggggttttttcgc

SEQ ID NO: 689 - RNA, 41 nt, synthetic construct
  misc_feature 1..41: note = Description of Artificial Sequence: Synthetic oligonucleotide
  source 1..41: mol_type = other RNA
tcacactggctcaccttcgggtgggcctttctgcgtttata

SEQ ID NO: 690 - RNA, 46 nt, synthetic construct
  misc_feature 1..46: note = Description of Artificial Sequence: Synthetic oligonucleotide
  source 1..46: mol_type = other RNA
agagaatataaaaagccagattattaatccggcttttttattattt

SEQ ID NO: 691 - RNA, 80 nt, synthetic construct
  misc_feature 1..80: note = Description of Artificial Sequence: Synthetic oligonucleotide
  source 1..80: mol_type = other RNA
ccaggcatcaaataaaacgaaaggctcagtcgaaagactgggcctttcgttttatctgttgtttgtcggtgaacgctctc

SEQ ID NO: 692 - RNA, 123 nt, synthetic construct
  misc_feature 1..123: note = Description of Artificial Sequence: Synthetic polynucleotide
  source 1..123: mol_type = other RNA
atcaaaatttacggctttgaaaaagtaatttcgtgaccttcggtataaggttactactagattcaggtgctcatcagatgcaccacattctctataaaaaaaaatggtatctttcttatttga

SEQ ID NO: 693 - RNA, 129 nt, synthetic construct
  misc_feature 1..129: note = Description of Artificial Sequence: Synthetic polynucleotide
  source 1..129: mol_type = other RNA
ccaggcatcaaataaaacgaaaggctcagtcgaaagactgggcctttcgttttatctgttgtttgtcggtgaacgctctctactagagtcacactggctcaccttcgggtgggcctttctgcgtttata

SEQ ID NO: 694 - RNA, 129 nt, synthetic construct
  misc_feature 1..129: note = Description of Artificial Sequence: Synthetic polynucleotide
  source 1..129: mol_type = other RNA
gcatgtgctctgtatgtatataaaactcttgttttcttcttttctctaaatattctttccttatacattaggacctttgcagcataaattactatacttctattactagagcccgccgccaccatggag

SEQ ID NO: 695 - RNA, 139 nt, synthetic construct
  misc_feature 1..139: note = Description of Artificial Sequence: Synthetic polynucleotide
  source 1..139: mol_type = other RNA
attccgataacttgtttattgcagcttataatggttacaaataaagcaatagcatcacaaatttcacaaataaagcatttttttcactgcattctagttgtggtttgtccaaactcatcaatgtatcttatcatgtctg

SEQ ID NO: 696 - RNA, 225 nt, synthetic construct
  misc_feature 1..225: note = Description of Artificial Sequence: Synthetic polynucleotide
  source 1..225: mol_type = other RNA
taataagcgaatttcttatgatttatgatttttattattaaataagttataaaaaaaataagtgtatacaaattttaaagtgactcttaggttttaaaacgaaaattcttattcttgagtaactctttcctgtaggtcaggttgctttctcaggtatagcatgaggtcgctcttattgaccacacctctaccggcatgccgagcaaatgcctgcaaatcgctccc

SEQ ID NO: 697 - RNA, 53 nt, synthetic construct
  misc_feature 1..53: note = Description of Artificial Sequence: Synthetic oligonucleotide
  source 1..53: mol_type = other RNA
aactttcagtttagcggtctgttttagagctagaaatagcaagttaaaataag

SEQ ID NO: 698 - DNA, 31 bp, synthetic construct
  misc_feature 1..31: note = Description of Artificial Sequence: Synthetic oligonucleotide
  source 1..31: mol_type = other DNA
aaggtacccagaccgctaaactgaaagttac

SEQ ID NO: 699 - DNA, 31 bp, synthetic construct
  misc_feature 1..31: note = Description of Artificial Sequence: Synthetic oligonucleotide
  source 1..31: mol_type = other DNA
gtaactttcagtttagcggtctgggtacctt

SEQ ID NO: 700 - DNA, 40 bp, synthetic construct
  misc_feature 1..40: note = Description of Artificial Sequence: Synthetic oligonucleotide
  source 1..40: mol_type = other DNA
agtttttaaaagagcttggcggttgttttagtcccttttt

SEQ ID NO: 701 - DNA, 42 bp, synthetic construct
  misc_feature 1..42: note = Description of Artificial Sequence: Synthetic oligonucleotide
  source 1..42: mol_type = other DNA
caaagtttcattagttgaatttaactgttttagtcccttttt

SEQ ID NO: 702 - DNA, 42 bp, synthetic construct
  misc_feature 1..42: note = Description of Artificial Sequence: Synthetic oligonucleotide
  source 1..42: mol_type = other DNA
aagaatgaggatgatgatattttacagttttagtcccttttt

SEQ ID NO: 703 - DNA, 42 bp, synthetic construct
  misc_feature 1..42: note = Description of Artificial Sequence: Synthetic oligonucleotide
  source 1..42: mol_type = other DNA
gtgtgctaaaaaaaatggacttaaatgttttagtcccttttt

SEQ ID NO: 704 - DNA, 74 bp, synthetic construct
  misc_feature 1..74: note = Description of Artificial Sequence: Synthetic oligonucleotide
  source 1..74: mol_type = other DNA
aagaaatttaaaaagggactaaaataaagagtttgcgggactctgcggggttacaatcccctaaaaccgctttt

SEQ ID NO: 705 - DNA, 54 bp, synthetic construct
  misc_feature 1..54: note = Description of Artificial Sequence: Synthetic oligonucleotide
  source 1..54: mol_type = other DNA
ataactcgaccaatatttgacaaagtttcagttgctgaattatttggtaaacct

SEQ ID NO: 706 - DNA, 58 bp, synthetic construct
  misc_feature 1..58: note = Description of Artificial Sequence: Synthetic oligonucleotide
  source 1..58: mol_type = other DNA
ggcaggttttgtatggtcatataggagtgtttcagttgctgaattatttggtaaacct

SEQ ID NO: 707 - DNA, 69 bp, synthetic construct
  misc_feature 1..69: note = Description of Artificial Sequence: Synthetic oligonucleotide
  source 1..69: mol_type = other DNA
agctatagggttacctatcttttgagtgttggcaaataagtttcagttgctgaattatttggtaaacct

SEQ ID NO: 708 - DNA, 54 bp, synthetic construct
  misc_feature 1..54: note = Description of Artificial Sequence: Synthetic oligonucleotide
  source 1..54: mol_type = other DNA
atgcttttaaactactgatatatacgtttcagttgctgaattatttggtaaact

SEQ ID NO: 709 - DNA, 80 bp, synthetic construct
  misc_feature 1..80: note = Description of Artificial Sequence: Synthetic oligonucleotide
  source 1..80: mol_type = other DNA
gtaccaaataattaatgctctgtaatcatttaaaagtattttgaacggacctctgtttgacacgtctgaataactaaaaa

SEQ ID NO: 710 - DNA, 52 bp, synthetic construct
  misc_feature 1..52: note = Description of Artificial Sequence: Synthetic oligonucleotide
  source 1..52: mol_type = other DNA
tatccattcccagccggaaattaagttgtagctccctttctcatttcgcagt

SEQ ID NO: 711 - DNA, 53 bp, synthetic construct
  misc_feature 1..53: note = Description of Artificial Sequence: Synthetic oligonucleotide
  source 1..53: mol_type = other DNA
gcctttttacaagctcgctttctttgttgtagctccctttctcatttcgcagt

SEQ ID NO: 712 - DNA, 53 bp, synthetic construct
  misc_feature 1..53: note = Description of Artificial Sequence: Synthetic oligonucleotide
  source 1..53: mol_type = other DNA
taaaggtttctgttgcgacccgaatgttgtagctccctttctcatttcgcagt

SEQ ID NO: 713 - DNA, 55 bp, synthetic construct
  misc_feature 1..55: note = Description of Artificial Sequence: Synthetic oligonucleotide
  source 1..55: mol_type = other DNA
taactttgaccgtgtgcaatccagttagttgtagctccctttctcatttcgcagt

SEQ ID NO: 714 - DNA, 52 bp, synthetic construct
  misc_feature 1..52: note = Description of Artificial Sequence: Synthetic oligonucleotide
  source 1..52: mol_type = other DNA
aacccactaaattttgcaaatgcggttgtagctccctttctcatttcgcagt

SEQ ID NO: 715 - DNA, 53 bp, synthetic construct
  misc_feature 1..53: note = Description of Artificial Sequence: Synthetic oligonucleotide
  source 1..53: mol_type = other DNA
tttttttgtactgttgtttgaacgagttgtagctccctttctcatttcgcagt

SEQ ID NO: 716 - DNA, 55 bp, synthetic construct
  misc_feature 1..55: note = Description of Artificial Sequence: Synthetic oligonucleotide
  source 1..55: mol_type = other DNA
ttcgtttcagatagcaaacgcagtagtgttgtagctccctttctcatttcgcagt

SEQ ID NO: 717 - DNA, 84 bp, synthetic construct
  misc_feature 1..84: note = Description of Artificial Sequence: Synthetic oligonucleotide
  source 1..84: mol_type = other DNA
atatgacggtgggcaactggtacaggttgtagctccctttctcatttcgcagtgctacaatgccggatatgacggtgggcaact

SEQ ID NO: 718 - DNA, 52 bp, synthetic construct
  misc_feature 1..52: note = Description of Artificial Sequence: Synthetic oligonucleotide
  source 1..52: mol_type = other DNA
cttttgtattgattcaaggtgcttgttgtagctccctttctcatttcgcagt

SEQ ID NO: 719 - DNA, 55 bp, synthetic construct
  misc_feature 1..55: note = Description of Artificial Sequence: Synthetic oligonucleotide
  source 1..55: mol_type = other DNA
attcgtcgatgatggaaactcgagcatgttgtagctccctttctcatttcgcagt

SEQ ID NO: 720 - DNA, 55 bp, synthetic construct
  misc_feature 1..55: note = Description of Artificial Sequence: Synthetic oligonucleotide
  source 1..55: mol_type = other DNA
tagccagtgctaaaaccgcacccgcttgttgtagctccctttctcatttcgcagt

SEQ ID NO: 721 - DNA, 54 bp, synthetic construct
  misc_feature 1..54: note = Description of Artificial Sequence: Synthetic oligonucleotide
  source 1..54: mol_type = other DNA
atagaaatacatacgccgagtaattagttgtagctccctttctcatttcgcagt

SEQ ID NO: 722 - DNA, 54 bp, synthetic construct
  misc_feature 1..54: note = Description of Artificial Sequence: Synthetic oligonucleotide
  source 1..54: mol_type = other DNA
tttttgtaattgttctgccttttttagttgtagctccctttctcatttcgcagt

SEQ ID NO: 723 - DNA, 53 bp, synthetic construct
  misc_feature 1..53: note = Description of Artificial Sequence: Synthetic oligonucleotide
  source 1..53: mol_type = other DNA
acggcggaaaccattgccacaaaacgttgtagctccctttctcatttcgcagt

SEQ ID NO: 724 - DNA, 54 bp, synthetic construct
  misc_feature 1..54: note = Description of Artificial Sequence: Synthetic oligonucleotide
  source 1..54: mol_type = other DNA
aataataacccaatacacgatgttaagttgtagctccctttctcatttcgcagt

SEQ ID NO: 725 - DNA, 171 bp, synthetic construct
  misc_feature 1..171: note = Description of Artificial Sequence: Synthetic polynucleotide
  source 1..171: mol_type = other DNA
ttgtcttatttatatacaaatagattattgacttatcatctcacaacggctagaatcccaaacatattgtcgcactgcgaaatgagaaccgttgctacaataaggccgtctgaaaagatgtgccgcaacgctctgccccttaaagcttctgctttaaggggcatcgtttat

SEQ ID NO: 726 - DNA, 35 bp, synthetic construct
  misc_feature 1..35: note = Description of Artificial Sequence: Synthetic oligonucleotide
  source 1..35: mol_type = other DNA
ggtaactttgcctaggatagttttagagctatgtt

SEQ ID NO: 727 - DNA, 22 bp, synthetic construct
  misc_feature 1..22: note = Description of Artificial Sequence: Synthetic oligonucleotide
  source 1..22: mol_type = other DNA
cattatgttttagagctatgtt

SEQ ID NO: 728 - DNA, 24 bp, synthetic construct
  misc_feature 1..24: note = Description of Artificial Sequence: Synthetic oligonucleotide
  source 1..24: mol_type = other DNA
gagttttagagctatgttattttg

SEQ ID NO: 729 - DNA, 27 bp, synthetic construct
  misc_feature 1..27: note = Description of Artificial Sequence: Synthetic oligonucleotide
  source 1..27: mol_type = other DNA
ttatagttttagagctatgttattttg

SEQ ID NO: 730 - DNA, 26 bp, synthetic construct
  misc_feature 1..26: note = Description of Artificial Sequence: Synthetic oligonucleotide
  source 1..26: mol_type = other DNA
taaatgttttagagctatgttatttt

SEQ ID NO: 731 - DNA, 23 bp, synthetic construct
  misc_feature 1..23: note = Description of Artificial Sequence: Synthetic oligonucleotide
  source 1..23: mol_type = other DNA
tacaagttttagagctatgttat

SEQ ID NO: 732 - DNA, 30 bp, synthetic construct
  misc_feature 1..30: note = Description of Artificial Sequence: Synthetic oligonucleotide
  source 1..30: mol_type = other DNA
ttcatgttgttttagagctatgttattttg

SEQ ID NO: 733 - DNA, 28 bp, synthetic construct
  misc_feature 1..28: note = Description of Artificial Sequence: Synthetic oligonucleotide
  source 1..28: mol_type = other DNA
gttttagagctatgctatttcgaatact

SEQ ID NO: 734 - DNA, 92 bp, synthetic construct
  misc_feature 1..92: note = Description of Artificial Sequence: Synthetic oligonucleotide
  source 1..92: mol_type = other DNA
attgttagtattcaaaataacatagcaagttaaaataaggctttgtccgttatcaacttttaattaagtagcgctgtttcggcgcttttttt

SEQ ID NO: 735 - DNA, 43 bp, synthetic construct
  misc_feature 1..43: note = Description of Artificial Sequence: Synthetic oligonucleotide
  source 1..43: mol_type = other DNA
gccattaattaatatggtgagttttagagctgtgttgtttcga

SEQ ID NO: 736 - DNA, 43 bp, synthetic construct
  misc_feature 1..43: note = Description of Artificial Sequence: Synthetic oligonucleotide
  source 1..43: mol_type = other DNA
gctagcgcagttagtgctctgttttagagctgtgttgtttcga

SEQ ID NO: 737 - DNA, 43 bp, synthetic construct
  misc_feature 1..43: note = Description of Artificial Sequence: Synthetic oligonucleotide
  source 1..43: mol_type = other DNA
tgttgtgtcatcatagttaggttttagagctgtgttgtttcga

SEQ ID NO: 738 - DNA, 43 bp, synthetic construct
  misc_feature 1..43: note = Description of Artificial Sequence: Synthetic oligonucleotide
  source 1..43: mol_type = other DNA
caattagacaatagacaaacgttttagagctgtgttgtttcga

SEQ ID NO: 739 - DNA, 44 bp, synthetic construct
  misc_feature 1..44: note = Description of Artificial Sequence: Synthetic oligonucleotide
  source 1..44: mol_type = other DNA
ttcggacatgacttgccacagttttagagctgtgttgttatcga

SEQ ID NO: 740 - DNA, 107 bp, synthetic construct
  misc_feature 1..107: note = Description of Artificial Sequence: Synthetic polynucleotide
  source 1..107: mol_type = other DNA
gttggaatcattcgaaacaacacagcaagttaaaataaggcagtgatttttaatccagtccgtacacaacttgaaaaagtgcgcaccgattcggtgcttttttattt

SEQ ID NO: 741 - RNA, 20 nt, synthetic construct
  misc_feature 1..20: note = Description of Artificial Sequence: Synthetic oligonucleotide
  source 1..20: mol_type = other RNA
tggtccgctgccgttcgctt

SEQ ID NO: 742 - RNA, 20 nt, synthetic construct
  misc_feature 1..20: note = Description of Artificial Sequence: Synthetic oligonucleotide
  source 1..20: mol_type = other RNA
gcagaaaaaaaccatgggtt

SEQ ID NO: 743 - RNA, 20 nt, synthetic construct
  misc_feature 1..20: note = Description of Artificial Sequence: Synthetic oligonucleotide
  source 1..20: mol_type = other RNA
aaaaaaccggttcagctgcc

SEQ ID NO: 744 - RNA, 20 nt, synthetic construct
  misc_feature 1..20: note = Description of Artificial Sequence: Synthetic oligonucleotide
  source 1..20: mol_type = other RNA
aactttcagtttagcggtct

SEQ ID NO: 745 - RNA, 20 nt, synthetic construct
  misc_feature 1..20: note = Description of Artificial Sequence: Synthetic oligonucleotide
  source 1..20: mol_type = other RNA
aggacagtttcaggtagtcc

SEQ ID NO: 746 - RNA, 20 nt, synthetic construct
  misc_feature 1..20: note = Description of Artificial Sequence: Synthetic oligonucleotide
  source 1..20: mol_type = other RNA
aaccggttttttagccatgt

SEQ ID NO: 747 - RNA, 20 nt, synthetic construct
  misc_feature 1..20: note = Description of Artificial Sequence: Synthetic oligonucleotide
  source 1..20: mol_type = other RNA
ttgacagctagctcagtcct

SEQ ID NO: 748 - RNA, 20 nt, synthetic construct
  misc_feature 1..20: note = Description of Artificial Sequence: Synthetic oligonucleotide
  source 1..20: mol_type = other RNA
cccggaagagagtcaattca

SEQ ID NO: 749 - RNA, 20 nt, synthetic construct
  misc_feature 1..20: note = Description of Artificial Sequence: Synthetic oligonucleotide
  source 1..20: mol_type = other RNA
ccctgaattgactctcttcc

SEQ ID NO: 750 - RNA, 20 nt, synthetic construct
  misc_feature 1..20: note = Description of Artificial Sequence: Synthetic oligonucleotide
  source 1..20: mol_type = other RNA
gaattcattaaagaggagaa

SEQ ID NO: 751 - RNA, 20 nt, synthetic construct
  misc_feature 1..20: note = Description of Artificial Sequence: Synthetic oligonucleotide
  source 1..20: mol_type = other RNA
gaatggtgcaaaacctttcg

SEQ ID NO: 752 - DNA, 141 bp, synthetic construct
  misc_feature 1..141: note = Description of Artificial Sequence: Synthetic polynucleotide
  source 1..141: mol_type = other DNA
cgacaccatcgaatggtgcaaaacctttcgcggtatggcatgatagcgcccggaagagagtcaattcagggtggtgaatttgacagctagctcagtcctaggtataatagatctgaattcattaaagaggagaaaggtacc

SEQ ID NO: 753 - RNA, 20 nt, synthetic construct
  misc_feature 1..20: note = Description of Artificial Sequence: Synthetic oligonucleotide
  source 1..20: mol_type = other RNA
aactttcagtttagcggtct

SEQ ID NO: 754 - RNA, 20 nt, synthetic construct
  misc_feature 1..20: note = Description of Artificial Sequence: Synthetic oligonucleotide
  source 1..20: mol_type = other RNA
tggaaccgtactggaactgc

SEQ ID NO: 755 - RNA, 20 nt, synthetic construct
  misc_feature 1..20: note = Description of Artificial Sequence: Synthetic oligonucleotide
  source 1..20: mol_type = other RNA
ggtagtccgggatgtcagcc

SEQ ID NO: 756 - RNA, 20 nt, synthetic construct
  misc_feature 1..20: note = Description of Artificial Sequence: Synthetic oligonucleotide
  source 1..20: mol_type = other RNA
aggacagtttcaggtagtcc

SEQ ID NO: 757 - RNA, 20 nt, synthetic construct
  misc_feature 1..20: note = Description of Artificial Sequence: Synthetic oligonucleotide
  source 1..20: mol_type = other RNA
gtcttgcagggaggagtcct

SEQ ID NO: 758 - RNA, 20 nt, synthetic construct
  misc_feature 1..20: note = Description of Artificial Sequence: Synthetic oligonucleotide
  source 1..20: mol_type = other RNA
gcataaccggaccgtcggac

SEQ ID NO: 759 - RNA, 20 nt, synthetic construct
  misc_feature 1..20: note = Description of Artificial Sequence: Synthetic oligonucleotide
  source 1..20: mol_type = other RNA
ctttcagagcaccgtcttcc

SEQ ID NO: 760 - RNA, 20 nt, synthetic construct
  misc_feature 1..20: note = Description of Artificial Sequence: Synthetic oligonucleotide
  source 1..20: mol_type = other RNA
gatggtgtagtcttcgttgt

SEQ ID NO: 761 - RNA, 20 nt, synthetic construct
  misc_feature 1..20: note = Description of Artificial Sequence: Synthetic oligonucleotide
  source 1..20: mol_type = other RNA
catctaattcaacaagaatt

SEQ ID NO: 762 - RNA, 20 nt, synthetic construct
  misc_feature 1..20: note = Description of Artificial Sequence: Synthetic oligonucleotide
  source 1..20: mol_type = other RNA
catctaattcaacaagaatt

SEQ ID NO: 763 - RNA, 20 nt, synthetic construct
  misc_feature 1..20: note = Description of Artificial Sequence: Synthetic oligonucleotide
  source 1..20: mol_type = other RNA
agtagtgcaaataaatttaa

SEQ ID NO: 764 - RNA, 20 nt, synthetic construct
  misc_feature 1..20: note = Description of Artificial Sequence: Synthetic oligonucleotide
  source 1..20: mol_type = other RNA
acaagtgttggccacggaac

SEQ ID NO: 765 - RNA, 20 nt, synthetic construct
  misc_feature 1..20: note = Description of Artificial Sequence: Synthetic oligonucleotide
  source 1..20: mol_type = other RNA
tttcatgtgatccggataac

SEQ ID NO: 766 - RNA, 20 nt, synthetic construct
  misc_feature 1..20: note = Description of Artificial Sequence: Synthetic oligonucleotide
  source 1..20: mol_type = other RNA
cgttcctgtacataaccttc

SEQ ID NO: 767 - RNA, 20 nt, synthetic construct
  misc_feature 1..20: note = Description of Artificial Sequence: Synthetic oligonucleotide
  source 1..20: mol_type = other RNA
taactcgatacgattaacaa

SEQ ID NO: 768 - RNA, 20 nt, synthetic construct
  misc_feature 1..20: note = Description of Artificial Sequence: Synthetic oligonucleotide
  source 1..20: mol_type = other RNA
ataatggtctgctagttgaa

SEQ ID NO: 769 - RNA, 20 nt, synthetic construct
  misc_feature 1..20: note = Description of Artificial Sequence: Synthetic oligonucleotide
  source 1..20: mol_type = other RNA
atgtggtcacgcttttcgtt

SEQ ID NO: 770 - RNA, 20 nt, synthetic construct
  misc_feature 1..20: note = Description of Artificial Sequence: Synthetic oligonucleotide
  source 1..20: mol_type = other RNA
aactttcagtttagcggtct

SEQ ID NO: 771 - RNA, 20 nt, synthetic construct
  misc_feature 1..20: note = Description of Artificial Sequence: Synthetic oligonucleotide
  source 1..20: mol_type = other RNA
tggaaccgtactggaactgc

SEQ ID NO: 772 - RNA, 20 nt, synthetic construct
  misc_feature 1..20: note = Description of Artificial Sequence: Synthetic oligonucleotide
  source 1..20: mol_type = other RNA
gatggtgtagtcttcgttgt

SEQ ID NO: 773 - RNA, 20 nt, synthetic construct
  misc_feature 1..20: note = Description of Artificial Sequence: Synthetic oligonucleotide
  source 1..20: mol_type = other RNA
ttccgggtacatacgttcgg

SEQ ID NO: 774 - RNA, 20 nt, synthetic construct
  misc_feature 1..20: note = Description of Artificial Sequence: Synthetic oligonucleotide
  source 1..20: mol_type = other RNA
ggtagtccgggatgtcagcc

SEQ ID NO: 775 - RNA, 20 nt, synthetic construct
  misc_feature 1..20: note = Description of Artificial Sequence: Synthetic oligonucleotide
  source 1..20: mol_type = other RNA
aggacagtttcaggtagtcc

SEQ ID NO: 776 - RNA, 20 nt, synthetic construct
  misc_feature 1..20: note = Description of Artificial Sequence: Synthetic oligonucleotide
  source 1..20: mol_type = other RNA
ttgacagctagctcagtcct

SEQ ID NO: 777 - RNA, 20 nt, synthetic construct
  misc_feature 1..20: note = Description of Artificial Sequence: Synthetic oligonucleotide
  source 1..20: mol_type = other RNA
aaccggttttttagccatgt

SEQ ID NO: 778 - RNA, 20 nt, synthetic construct
  misc_feature 1..20: note = Description of Artificial Sequence: Synthetic oligonucleotide
  source 1..20: mol_type = other RNA
aaaaaaccggttcagctgcc

SEQ ID NO: 779 - RNA, 20 nt, synthetic construct
  misc_feature 1..20: note = Description of Artificial Sequence: Synthetic oligonucleotide
  source 1..20: mol_type = other RNA
ttgggaagggcgatcggtgc

SEQ ID NO: 780 - RNA, 20 nt, synthetic construct
  misc_feature 1..20: note = Description of Artificial Sequence: Synthetic oligonucleotide
  source 1..20: mol_type = other RNA
gctggcctggttcaccacgc

SEQ ID NO: 781 - RNA, 20 nt, synthetic construct
  misc_feature 1..20: note = Description of Artificial Sequence: Synthetic oligonucleotide
  source 1..20: mol_type = other RNA
gtagccaaatcgggaaaaac

SEQ ID NO: 782 - RNA, 20 nt, synthetic construct
  misc_feature 1..20: note = Description of Artificial Sequence: Synthetic oligonucleotide
  source 1..20: mol_type = other RNA
cggtaagccttcgcacatat

SEQ ID NO: 783 - RNA, 20 nt, synthetic construct
  misc_feature 1..20: note = Description of Artificial Sequence: Synthetic oligonucleotide
  source 1..20: mol_type = other RNA
acaagaaccattcgagagtc

SEQ ID NO: 784 - RNA, 20 nt, synthetic construct
  misc_feature 1..20: note = Description of Artificial Sequence: Synthetic oligonucleotide
  source 1..20: mol_type = other RNA
gtcaagcagcagtatatgct

SEQ ID NO: 785 - RNA, 20 nt, synthetic construct
  misc_feature 1..20: note = Description of Artificial Sequence: Synthetic oligonucleotide
  source 1..20: mol_type = other RNA
tgtgagttagctcactcatt

SEQ ID NO: 786 - RNA, 20 nt, synthetic construct
  misc_feature 1..20: note = Description of Artificial Sequence: Synthetic oligonucleotide
  source 1..20: mol_type = other RNA
atgttgtgtggaattgtgag

SEQ ID NO: 787 - RNA, 20 nt, synthetic construct
  misc_feature 1..20: note = Description of Artificial Sequence: Synthetic oligonucleotide
  source 1..20: mol_type = other RNA
cttccggctcgtatgttgtg

SEQ ID NO: 788 - RNA, 20 nt, synthetic construct
  misc_feature 1..20: note = Description of Artificial Sequence: Synthetic oligonucleotide
  source 1..20: mol_type = other RNA
gggcgaggagctgttcaccg

SEQ ID NO: 789 - RNA, 20 nt, synthetic construct
  misc_feature 1..20: note = Description of Artificial Sequence: Synthetic oligonucleotide
  source 1..20: mol_type = other RNA
ggccacaagttcagcgtgtc

SEQ ID NO: 790 - RNA, 20 nt, synthetic construct
  misc_feature 1..20: note = Description of Artificial Sequence: Synthetic oligonucleotide
  source 1..20: mol_type = other RNA
gcccttgctcaccatggttg

SEQ ID NO: 791 - RNA, 20 nt, synthetic construct
  misc_feature 1..20: note = Description of Artificial Sequence: Synthetic oligonucleotide
  source 1..20: mol_type = other RNA
gaccaggatgggcaccaccc

SEQ ID NO: 792 - RNA, 20 nt, synthetic construct
  misc_feature 1..20: note = Description of Artificial Sequence: Synthetic oligonucleotide
  source 1..20: mol_type = other RNA
ggtggtgcagatgaacttca

SEQ ID NO: 793 - RNA, 20 nt, synthetic construct
  misc_feature 1..20: note = Description of Artificial Sequence: Synthetic oligonucleotide
  source 1..20: mol_type = other RNA
gtggtcacgagggtgggcca

SEQ ID NO: 794 - RNA, 20 nt, synthetic construct
  misc_feature 1..20: note = Description of Artificial Sequence: Synthetic oligonucleotide
  source 1..20: mol_type = other RNA
gcacggggccgtcgccgatg

SEQ ID NO: 795 - protein, 240 aa, Acetobacter aceti
MANIAENLVFGIDLGIGSCGWAVLNQKAKDENIVALGSWCFDVPETDKERIPTNQIRRANRLLRRVIRRRRNRMAEIRRLFASKGMLDTADPDALAKISADPWEMRAKGLDYQLTPQEFAVALGHIAKRRGFKSAAKRVSTNAPSEDSKMLAALEKTKEQSAQYRTIGEMFARDPAYADRRRNRDGCFDRTMSREDLFKETQILFESQRRLGNFSATSETEQAFIDIAFRQKPMQDSERL

SEQ ID NO: 796 - protein, 400 aa, Acetobacter aceti
SFERFRLLCRLVNLRVTDGLEDRPLTPEELRLACEDAGKTRKLSVKKVRSLIGLRDDQRFTTIPPDQEQHDIAARTGDALTGTATFRAILGESFWRQLLPHPEQLDRAAWIISFHELTDTIISKLATIGLPSEVMELIRKALEDGKFSKFKGAASLSDKAARKLIPFLQEGLTYDKACQKAGYNHAASKFTHYDSIDTKAKFNSLMDDVRDSITNPVARKAISEGMKQVWAMRNQWGLPGAICIELARDVGNSAEKRREIESGIKKNTAQRERERQEAKEHLNQSDISSETLLRYRLWKEQGGRCCYTDQPITPSQLIASDNSVQVDHILPWSRFGDDSYLNKALCTAKANQEKKNRTPWEWIHNQKGVEAWNHFTAAVESRKETRGLKKRNFLLKSSKE

SEQ ID NO: 797 - protein, 376 aa, Acetobacter aceti
YAARVMAEAVRLLYPSGNRAEKGGVKRVFTRPGALTAALRHAWGVESLKKINGKRLNDDRHHALDAAVVAAVSEKEIQKLTKSFQICEQKGLARPMRDVPMPWEGFRHQLETAYADIRVARPERRRARGKGHDATIRQLREEKDGPVVYERRAISDLKLTDLERIKDPERNSAIISSLRTWIEKGKPADYPPQSPKGDEIRKIRVMSRNKPAVSVRGGTADRGEMTRVDVFTKMGKKGKPEWFLVPIYRHQVIDRIQWPQPPNQAAANGKSEKNWPTMGLEHEFRFSLYPRSYVQIVKRDGEIIEGYFAGLDRTVAAFSLLSSSDPTSIQRGIGAKTLESIRKYNVNRFGDISMVEQETRTWHGDVCISPDQPDSA

SEQ ID NO: 798 - protein, 1054 aa, Actinobacillus suis
MKLTPLNYILGLDLGIASVGWAVVEIDEQENPLGLIDVGVRTFDRAEVPKTGESLALARRLARSARRLVKRRADRIKKAKRLLKAENILLSADEHLPNDVWQLRVKGLDQKLERQEWAAVLLHLLKHRGYLSQRKNESKSENKELGALLSGVETNHQILQSAEYRTPAEIAVKKFHVEDGHIRNQRGAYTHTFSRLDLLAEMELLFQRQTDLGNPHTSAKLLENLTALLMWQKPALAGEAILKMLGKCTFEPTEYKAAKNSYSAERFVWLTKLNNLRILEQGAERALTDNERFALLDQPYEKAKFTYAQARTMLALPDEAIFKGVRYQGEDKKAVETKTILMEMKAYHQIRKALENADLKAEWNELKNNSELLDDIGTAFSLHKTDEDICRYLDGKLSESILNALLENLNFDKFIQLSLKALQQILPLMLQGQRYDEAVSAIYGDHYGKKSAEINRLLPTIPADEIRNPVVLRTLTQARKVINAVVRLYGSPARIHIETGREVGKSYQDRKKLEKQQEDNRKQRESAVKKFKEYFPNFVGEPKGKDILKMRLYELQQAKCLYSGKSLELHRLLEKGYVEVDHALPFSRTWDDSFNNKVLVLANENQNKGNLTPYEWLDGKNNSEHWQNFVARVQTSGFSHTKKQRILSHKLDEKGFIERNLNDTRYVARFLCNFIADNMLLTGKGKRKVFASNGQITALLRGRWGLQKVRDDNDRHHALDAVVVACSTVVMQQKITRFVRYEEGNVFSGERIDRETGEIIPLHFPSPWAFFRENVEIRIFSENPKLELENRLPDYPQYNHEFVQPLFVSRMPTRKMTGQGHMETVKSAKRLDEGLSVLKVPLTQLKLSDLERMVNREREVTLYESLKARLEQFGNDPAKAFAEPFHKKGGAVVKAVRVEQTQKSGVLVRDGNGVADNASMVRVDVFTKGGKYFLVPIYTWQVAKGILPNKAVTANVDEIDWLEMDESYQFIFTMYPNDLVKVKLKKEEFFGYYGGLDRATGAIVIKEHDLEKSKGKQGIYRIGVKLALSFEKYQVDELGKNIRPCRPTKRQHVR

SEQ ID NO: 799 - protein, 239 aa, Actinobacillus ureae
MEIRIFSENPKLGLENRLPGYPQYNHEFVQPLFVSRMPTRKMTGKGHMETVKSAKRLDEGLSVLKVPLTQLKLSDLERMVNREREDALYQSLKAHLEQFGNDPAKAFAEPFHKKGGTVVKAVRVEQTQKSGVLVRDGNGVADNTSMVRVDVFTKAGKYFLVPIYKWQVAKRILPNKAVTAGVDEIDWLEMDSSYQFIFTMYANDLVKVKLKKRSILGLLRWFRSCNWGYCYQRTRFREI

SEQ ID NO: 800 - protein, 400 aa, Actinobacillus ureae
MKLTPLNYILGLDLGIASVGWAVVEIDEQENPLGLIDVGVRTFDRAEVAKTGESLALARRLARSSRRLVKRRADRIKKAKRLLKAENLLLSADEILPNDVWQLRVKGLDQKLERQEWAAVLLHILKHRGYLSQRKNESKSENKELGALLSGVATNHQLLQTAEYRTPAEITVKKFQAEENGHGHIRNQRGDYSHTFDRKDLLAEMKLLFQRQAELGNPHTSEKLLENLTTLLLWQKPALAGEAILKMLGKCTFEPAEYKAAKNSYSAERFVWLTKLNNLRILENGIERALTDNERFTLLDQPYEKAKLTYAQARTMLALSDEAIFKGVRYQGEDKKAAEKVALIEMKGYQHIRKALEGAGLKAEWNELKNNSELLDDIGTAFSLYFSISNLPTEIAYFTP

SEQ ID NO: 801 - protein, 1113 aa, Actinomyces georgiae
MSASSQNVERIRYKVGIDVGLRSIGFCAVQVDADDRPVKLLNTVVHVHDAGVSPADAKKADTRKLVSGVARRTRRLYRTRKRRLVDLDRQLDGLGWPLVDPARFADPREPWFAREKLVSGRVDDADERKELLSVALRHIAHHRGWRNPYSTVESLQADAPPSEFLQGLNQRVSEKLGTELDPGLTQGQLVAKLLHRFPNAKIRGPEGILRGKLHQSDNAGELRLICRTQGLDCHITEELVRLVFQAKSPKANKEMRKRIGRDQLPGQGAHIRAEKAHPVFQRFRIVAVLANLRIREAHVDRRLTAEEMRTLTDFLLGLAGSEQPTWEELADNLNIERHQLRGTAKASVDGAPALRFPPIDATTDRIYASKLKWLAEWWRQADEERRGYMVDALSNSGGSEDEPYLDDEIAEMLEQASEEDQAKLDSLHLPGGRASYCLDTLRRLTDAMLGGGLDLFEARKAVFHVDDDWAPPTDPIGAPVGNPPVDRVLKHVARWLEAATGRWGAPQTINIEHVREGLGSEKAARELTRMNDRRRRNNQKLVEEMGEKLGMSGRIRRSDRMRYEAIRRQNCECLYCGQPITYQTMEMDHIVPRAGAASTNSRSNLAAVCRRCNHQKGKLPFAVWAESQDSPAEVRLQDAVQRVRHWLRDAGMGQKELQALRVQVIARLKSKRPDEEFDGRSMESIAWMANELRARVEAQYRGSGTTVRVYRGALTAEARKASGFEGRVNLIGGRGKDRFDRRHHAMDALVIALMNQSVAQTLALRLNMRDSQWLTQSEQTWRQFHGAPGEAARKWEAWDRDMRDASDLFNLALDGGRIPITENVRLRVGNGRVHEDGVIRFKPEYEVKGKTIKGGEARLLGDSLPSEQIDRAETPALWTALTRLPEYDRKSGLPENPDRVIRVNGAVVQATDRIRFFGTPASVAVRGGYAKLGESIHHARIYRINGKTPKYAMIRVYTIDLMRLNHEDIFTAVLKPSTISMRCAEKKLKYAIAEGNAEQIGWLVEGDQLELDAAAYAKGVGADLMREYPMATCWRVAGFPDEAKLRLRPVLLAAEGMGEDAPKFMREVLENQGWRPAVNALLSPGSVRVVRRNVLGEPRFKSSGHLPTTVDLV

SEQ ID NO: 802 - protein, 1101 aa, Actinomyces naeslundii
MWYASLMSAHHLRVGIDVGTHSVGLATLRVDDHGTPIELLSALSHIHDSGVGKEGKKDHDTRKKLSGIARRARRLLHHRRTQLQQLDEVLRDLGFPIPTPGEFLDLNEQTDPYRVWRVRARLVEEKLPEELRGPAISMAVRHIARHRGWRNPYSKVESLLSPAEESPFMKALRERILATTGEVLDDGITPGQAMAQVALTHNISMRGPEGILGKLHQSDNANEIRKICARQGVSPDVCKQLLRAVFKADSPRGSAVSRVAPDPLPGQGSFRRAPKCDPEFQRFRIISIVANLRISETKGENRPLTADERRHVVTFLTEDSQADLTWVDVAEKLGVHRRDLRGTAVHTDDGERSAARPPIDATDRIMRQTKISSLKTWWEEADSEQRGAMIRYLYEDPTDSECAEIIAELPEEDQAKLDSLHLPAGRAAYSRESLTALSDHMLATTDDLHEARKRLFGVDDSWAPPAEAINAPVGNPSVDRTLKIVGRYLSAVESMWGTPEVIHVEHVRDGFTSERMADERDKANRRRYNDNQEAMKKIQRDYGKEGYISRGDIVRLDALELQGCACLYCGTTIGYHTCQLDHIVPQAGPGSNNRRGNLVAVCERCNRSKSNTPFAVWAQKCGIPHVGVKEAIGRVRGWRKQTPNTSSEDLTRLKKEVIARLRRTQEDPEIDERSMESVAWMANELHHRIAAAYPETTVMVYRGSITAAARKAAGIDSRINLIGEKGRKDRIDRRHHAVDASVVALMEASVAKTLAERSSLRGEQRLTGKEQTWKQYTGSTVGAREHFEMWRGHMLHLTELFNERLAEDKVYVTQNIRLRLSDGNAHTVNPSKLVSHRLGDGLTVQQIDRACTPALWCALTREKDFDEKNGLPAREDRAIRVHGHEIKSSDYIQVFSKRKKTDSDRDETPFGAIAVRGGFVEIGPSIHHARIYRVEGKKPVYAMLRVFTHDLLSQRHGDLFSAVIPPQSISMRCAEPKLRKAITTGNATYLGWVVVGDELEINVDSFTKYAIGRFLEDFPNTTRWRICGYDTNSKLTLKPIVLAAEGLENPSSAVNEIVELKGWRVAINVLTKVHPTVVRRDALGRPRYSSRSNLPTSWTIE

SEQ ID NO: 803 - protein, 1181 aa, Actinomyces sp.
MLHCIAVIRVPPSEEPGFFETHADSCALCHHGCMTYAANDKAIRYRVGIDVGLRSIGFCAVEVDDEDHPIRILNSVVHVHDAGTGGPGETESLRKRSGVAARARRRGRAEKQRLKKLDVLLEELGWGVSSNELLDSHAPWHIRKRLVSEYIEDETERRQCLSVAMAHIARHRGWRNSFSKVDTLLLEQAPSDRMQGLKERVEDRTGLQFSEEVTQGELVATLLEHDGDVTIRGFVRKGGKATKVHGVLEGKYMQSDLVAELRQICRTQRVSETTFEKLVLSIFHSKEPAPSAARQRERVGLDELQLALDPAAKQPRAERAHPAFQKFKVVATLANMRIREQSAGERSLTSEELNRVARYLLNHTESESPTWDDVARKLEVPRHRLRGSSRASLETGGGLTYPPVDDTTVRVMSAEVDWLADWWDCANDESRGHMIDAISNGCGSEPDDVEDEEVNELISSATAEDMLKLELLAKKLPSGRVAYSLKTLREVTAAILETGDDLSQAITRLYGVDPGWVPTPAPIEAPVGNPSVDRVLKQVARWLKFASKRWGVPQTVNIEHTREGLKSASLLEEERERWERFEARREIRQKEMYKRLGISGPFRRSDQVRYEILDLQDCACLYCGNEINFQTFEVDHIIPRVDASSDSRRTNLAAVCHSCNSAKGGLAFGQWVKRGDCPSGVSLENAIKRVRSWSKDRLGLTEKAMGKRKSEVISRLKTEMPYEEFDGRSMESVAWMAIELKKRIEGYFNSDRPEGCAAVQVNAYSGRLTACARRAAHVDKRVRLIRLKGDDGHHKNRFDRRNHAMDALVIALMTPAIARTIAVREDRREAQQLTRAFESWKNFLGSEERMQDRWESWIGDVEYACDRLNELIDADKIPVTENLRLRNSGKLHADQPESLKKARRGSKRPRPQRYVLGDALPADVINRVTDPGLWTALVRAPGFDSQLGLPADLNRGLKLRGKRISADFPIDYFPTDSPALAVQGGYVGLEFHHARLYRIIGPKEKVKYALLRVCAIDLCGIDCDDLFEVELKPSSISMRTADAKLKEAMGNGSAKQIGWLVLGDEIQIDPTKFPKQSIGKFLKECGPVSSWRVSALDTPSKITLKPRLLSNEPLLKTSRVGGHESDLVVAECVEKIMKKTGWVVEINALCQSGLIRVIRRNALGEVRTSPKSGLPISLNLR

SEQ ID NO: 804 - protein, 1120 aa, Actinomyces sp.
MNAMKQYNAGIDVGINSVGFAAIEVDSKGLPLNILNNMVVLHDSGVDPGTAKTGATRLANSGTARRTRKLIARRRKRLQKLDRYIEVQGWPLVDFSSLPDPYTPWKIRAKLTQDRLEGEEQGRGLSIALRHMARHRGWRNPYEGVESLHSPKEASKQFKDLKDRVTKVSGVIFDEDATPAEVVCDIGLSPKQRLRSAPSAKYKEGATLADEPVGGKSKEGLLGGKLMQSDNANELRKIGIVQGLSNEKVNEIIDQVFASESPKGQAGKRAKKDELPGQEQYVRALRAHLAFQRFRIVAAVANLRILEAEPKHERLLSQSEKDKVIEFLMSADGDDGVTWSDVAEELGIERECLSGTAKRGADGERPSSFPPTNSTNISIVRSKVKPLIEWWRKASDDEQATLVTALSNADELTDDQPSAETVRQFLSSPDEQSQEKIDKISLPKGRAAYSVNSLERLTRRMLKDSVDLFEARKREFGVDNNWTPTPDSIGEPVGNPAVDRVLKIVNRWLLAVTRKWGPPKVVNIEHVRVGFTSAAQTRKYEEENKTNRERNLAILEELRDKFGTSGKIRREDITRFAALRRQNCQCAYCGEAITFFDCEMDHIVPRKGPGSTNTRNNLVAICERCNKSKSNMPFSLWAQNCDIPGVSVEAVIDRVRTWIKDPELNPKQYNNFKKDVIERLRKTVDDDAIDNRSIESVAWMATELADRIGSHFRTAGANTKVRVYRGWLTSEARKASGFEGKINLIGGRGKTRLDRRHHAMDAATIALMRQSVAQTLVERASIRESDRLRRVVSSSWKDYRGADRDKQFSYGSWLNSMNALAELFNRAIDADGIPVTQNLRLRLGNGEAHDATIRSLEKKRVGASWTIGEIDRASTPQLWLALTRQEDFDQNDGLPANASRELRVKNHWFHAEENVTLFPTKSAAIAVRGGYAEIGNTIHHARLYKLPGKKLTYGMIRVFAIDLLCAWHTDLFSSPLLPESISLRTAETKVRRAVEDGAAMYIGWLVDGDEIVLDPETKAFKSNKIGEYLCEFPGTKRWKVDGFPDKEKLRLRPLQLAGEGLPEDVSAGTEEILGPKGNGWRVAINALFKSSQLVVVRRTALGMVRKLSRRHLPLTTRLRG

SEQ ID NO: 805 - protein, 1095 aa, Actinomyces sp.
MPAHHLRVGIDVGTHSVGLATLRVDDQGTPIELLSALSHIHDSGIGKEGQKDHDTRKKLSGVARRTRHLLRNRRERLQQLDKVLVDLGFPIPKPEEYPDLSERTDPYRVWRVRARLVEETLPEELRGPAISMAVRHIARHRGWRNPYSKVESLLSPAEESSFMKALRKRIMTKTGEVLDDDITPGQAMAQVALTHKIYMRGPEGILGKLHQSDNANEIRKICARQGISSDVCKQLLRAVFKAESPRGSAVSRVAPDPLPGQGSFRRAPKCDPEFQRFRIISIVANLRISETKGENRPLTVDERRQVVAFLMEDSQADLTWVDVAEKLRVSRQALRGTAMLTADGERSAAQPPIDVTDQIMRKTKISALKTWWDKADAERRGAMVRYLYEGLEDSECAEVIAKLPEKDHAKLDSLHLPAGRAAYSRESLTALSDHMLETTNDLHEARKRLFGVDDSWAPPAEPVGAPVGNPSVDRTLKIVARYLSAVESIWGTPEVIHVEHVRDGFTSERTAEERDKANRSRHNDNQKAIEKIQHDYGKEGYISRGDIVRFHALKLQGSACLYCGTTIGYHTCQLDHIVPQAGPGSNNRRGNLVAVCERCNHSKSNTPFAVWAQKCGIPHVGVKEAISRVNGWVEHNHSTSSGDLTRLKKEVIARLRRTQKDPEIDERSMESVAWMANELHHRIAAAYPETTVMVYRGSITAAARKAASIESRINLIGEKGRKDRLDRRHHAVDASVVALMEPSVAKTLAERSSLRGEQRLTGQEQTWKQYTGLTVGARERFEAWRGHMHRLTELFNESLAADEVYVTQNIRLRLSDGSAHTVKASKLVSHRLGDGLTVQQIDRACTPALWCALTREIDFDEKNGLPAREDRVIRVHGQEISSADCIQVFSKRKKTKSDRDEAPFGAIAVRGGFVEIGSSIHHARIYRIEGEKPAYAMLRVFTHDLLSQRHGDLFSAVIPPQSISMRCAATELRQAISEGRATYLGWIVSGDELHIPVETFTTHKIGSFLKDYPNTTRWRICGYDSETMLILKPRILSAEGLNNSSDIAEYVIKNKGWRVAINKLAKVHPTVVRRDALGRPRHSSRSNLPVTWSIE

SEQ ID NO: 806 - protein, 1144 aa, Actinomyces sp.
MSMIDSSENVPGIRYRVGIDVGLKSIGFCAVEVDRNDQPVRMLNSMVFIHDAGVDPNENKAAKSRKLTAGVARRTRRLYRTRHQRLVNLDRVLSKEFGWPLPDLTSFKDPREPWHVRAGLLEGYIADDEKRKEALSIALRHIARHRGWRNPYAKVETLLQPSEPSDFLKGLNDRISEELGRAFPADATPGQLVDTYLAHPDYVGRAGTPKLRGPQGILAGKLHQSDNAQEIRGICDVQRIEPAERDRLIRVVFEAKSPKGSAKERGLVGYDELPGQGRHVRAEKAHPAFQLFRMVSVLANLRIREGREERPLTPDELEDLVDFINQVSLKQEVTWQDLADKLRIERADLRGTAKASFDGSPVLRNPPTDVTTEKIMACKVKWLKEWWKEADDEQRGYMVDAFSNSGGSEDGTDVNDEVAELLEQATEDDQLEFEKISLPQGRAAYSLDSLRRLTDRMLRDGVDLHTARRLEFNVGDDWKPAVEPIGAPTGNPAVDRVLKQVSRWLHAATERWGEPTVINIEHARDGLGSERVARELMRENEKRRKANASAVAEMAAKLKLSGKVHRSDQIRYFALQRQNCQCLYCGAPITYTTAEMDHIVPRADGSSTNDRSNLAAVCRTCNHMKGKIPFAVWASSDKANQGVSLTGALERVNMWQRDSGMSPRQLKQLQREVCARLKSKKPDQEFDGRSMESVAWMAVELRTRIEGFYRSRDEESVPSVGVYRGQLTAEARRASGFESRVNLIGGRGKTRFDRRHHAMDALVIALMNPSVSRTLALRLNMRDAQRLTGVEETWKHFYGKPGEASKRFESWRESMLRGVELFNIALSDNAIPFVENIRLRVGSSVIHDATVHSFCPPKTPDGKQIITKGYGEQHSLGSAMPVELIDRAETPALWTALTRCPDFDPKKGLPENPQRTISVNGTRVGPTELVNFFEFSKSGPKACLKVRGGYVDLSGAIHHARIYRIAGKKTAYAMIRVFQVDLLRLKDHDVFTTPLKPSTISMRTAEPKIREALANGTATQIGWLVEGDELVIDTSKYSGGFIGEVLARYPEATSWRVAGFMTPAKLRIKPILLSKEGFVDETQAALLGVEVTSEAIQKTVDRPGWLPAVNVLFGAGGVRVIRRNCLGEERYHSSASLPVSMTLE

SEQ ID NO: 807 - protein, 1103 aa, Actinomyces sp.
MTKINDDLRYRVGIDVGLKSIGFCAVEVDENDQPLRLLNSMVFVHDAGVDPNENKAAKSRKLTAGVARRTQRGTAQNRRRLAELDRALSEELNWPLPNLEDFEDSYEPWHTRAELVEHYIKDDAERAEALAIAIRHIARHRGWRNPYLSVDSLLTPQEPSKFLRGLNERVTQALGREFPADATPGQLICAYIDSPKYAETQGIRGDSGILSGKLHQFDNVGEIRKICEVQRLDHDVFKLLVRKVFFAKSPRGSAAGLVGHDQIPGQGKYIRAEKAHPDFQLFRIVAVLTNLRIREGKAERCLTPDELRGLVDYILEVQLKQQVTWADLADNLGIERTDLRGTARASFDGSPALRFPPTDVTAEKIMASKVKWLKDWWDKADSERRGFMVDALSNSGGSTGDNDIDDEVAALLEAATEDEQAELEKIQLPQGRAAYSLDSLRRLTKRMLEEGVDLHTARKEEFNVDDDWRPEPEPIEAPVGNPAVDRVLKQVARWLNMATDRWGVPDVINIEHTRDGLGSEKVARELLRESQKRQDLNQKDMDKMIRELGISGKARRSSLIKYQAIQRQNSMCLYCGTEIGFETAEMDHIVPRALSGSTNDRSNLAAVCRACNHQKGAVPFAVWATSGEAHAGVSLEDAIKRVRLWQKGPGMSPKQHKAFQNEVISRLKSRKPDEEFDGRSMESVAWMAVELRTRIDGYYRKVNSDSVPKVGIYRGQLTAEARKASGFENRVNLIGGKGKTRFDRRHHAMDALVIAMMNQSVSQTLALRVNMRESQRITGQEETWKNFYGKPGQASERFEKWREGMLRAVELFNIELAKNAIPFHENVRLRVGSSKVHDDTVRKFIHAKLGEALSVAMIDCAETPALWTALTRLPDFDPKDGLPEDLSREIYIHSRKITADEQLNFFNSPSACLKVRGGYVEIGSSIHHARVYRIDGKKTTYSMVRVFATDLVKMTHEDVFTTPLKPSTISMRTADPKIRKALADGTATQIGWLVEGDELQLETDKYSGGLIGEVLAEYPQLTSWRVAGFYGVTQLRLRPYMLAAEGIPSDASESLRKVIEGKGWLPAINALLSSGCVKVVRRNCLGEPRFNAKSSLPVSQLLR

SEQ ID NO: 808 - protein, 1114 aa, Actinomyces turicensis
MQFHFYMVYVTMKGMNDKDASQQLRYRVGIDVGTHSIGFCAVEVDESGMPIQLLNSMVHKHDSGIDPGGNDTATTRLAEAGVARRTRRLIRRRKKRLQELDAFIEECGWPLVDLATITDARSPWRIRAHLATEHIDDEAEQGKLLSIALRHMARHRGWRSPYARISSLHIQADPSEQLKALAQRVSEKTGISLTADQTPAQLISVYLDVFETGKLRGPEGILGGKLMQSDNANELRRIATVQGLDNDLLKKIIGFVFAAESPKGSAAKRVGKDVLPGAHGLRAEKAHPAFQQFRIVSIVQNLRIKEGTGLRALTSEETEIVVDFLNQAGLTEAPTWEEVADNLEIPRSHLKGTATEGFDGIAPSTRPPFDVTSQKILNGKLKKLSAWWKDADYDHRCAMVNALSNVGSDDEGSLADDDVREFLSDFTDEELEALDKVELPGGRAAYSVDSLEKLTNTMLSEGCDLHSARKIAFGVDDSWTPPAEPIGQPVGNPAVDRVLKQVARWISAATNQWGTPESVNIEHVRDALGSEKASREYQRSLQTRRIRNEKLFAEMRERLDIGGKPRRSELTRYLALQRQNCQCLYCGMPITYTDAEMDHIVPRKGAASTNTRENFAAVCRACNHQKSNLPFAVWAEKTERPGVSVKEAYKRVSDMRIEPGMNGRQMNEFRKAIRLRLTTKHADAEIDGRSLESVAWMANELRHRIEGFYRSAENDVTVRVFRGAVTAEGRRASGFESRVNLIGGKGKTRLDRRHHAMDALTIALMEPGIAQTIALRMNMRESQRVLGEQETWKSFTGGSDTARKRWEHWCEEMLRASELFNVFLAEDRIPICQNKRLRLGSSAVHKAIVQPFEASDKRIVSDAMPVELIDRASTPALWTALTRDPDFDPKEGLPANPSRTIRLHDKRLGPNETVEFFPTAAACLAIRGGYCEIGAGIHHARIFRISGKKTTYAMLRVYQCDLVRFQKENLLTVELPANTISVRTAVPKLREALAHGTAEQIGWLVVGDELKIDLSGFTTGQIETFNETYPQATRWEVTGFPTKTQLRLKPLLIASEGLADDVPDDIVKIVKGPGWWPAIDKLLKIGNVVLYRRDTHGKPRVVSHRSLPLSSKLQ

SEQ ID NO: 809 - protein, 1113 aa, Alcanivorax sp.
MRYRVGLDLGTASVGAAVFSMDEQGNPMELIWHYERLFSEPLVPDMGQLKPKKAARRLARQQRRQIDRRASRLRRIAIVSRRLGIAPGRNDSGVHGNDVPTLRAMAVNERIELGQLRAVLLRMGKKRGYGGTFKAVRKVGEAGEVASGASRLEEEMVALASVQNKDSVTVGEYLAARVEHGLPSKLKVAANNEYYAPEYALFRQYLGLPAIKGRPDCLPNMYALRHQIEHEFERIWATQSQFHDVMKDHGVKEEIRNAIFFQRPLKSPADKVGRCSLQTNLPRAPRAQIAAQNFRIEKQMADLRWGMGRRAEMLNDHQKAVIRELLNQQKELSFRKIYKELERAGCPGPEGKGLNMDRAALGGRDDLSGNTTLAAWRKLGLEDRWQELDEVTQIQVINFLADLGSPEQLDTDDWSCRFMGKNGRPRNFSDEFVAFMNELRMTDGFDRLSKMGFEGGRSSYSIKALKALTEWMIAPHWRETPETHRVDEEAAIRECYPESLATPAQGGRQSKLEPPPLTGNEVVDVALRQVRHTINMMIDDLGSVPAQIVVEMAREMKGGVTRRNDIEKQNKRFASERKKAAQSIEENGKTPTPARILRYQLWIEQGHQCPYCESNISLEQALSGAYTNFEHILPRTLTQIGRKRSELVLAHRECNDEKGNRTPYQAFGHDDRRWRIVEQRANALPKKSSRKTRLLLLKDFEGEALTDESIDEFADRQLHESSWLAKVTTQWLSSLGSDVYVSRGSLTAELRRRWGLDTVIPQVRFESGMPVVDEEGAEITPEEFEKFRLQWEGHRVTREMRTDRRPDKRIDHRHHLVDAIVTALTSRSLYQQYAKAWKVADEKQRHGRVDVKVELPMPILTIRDIALEAVRSVRISHKPDRYPDGRFFEATAYGIAQRLDERSGEKVDWLVSRKSLTDLAPEKKSIDVDKVRANISRIVGEAIRLHISNIFEKRVSKGMTPQQALREPIEFQGNILRKVRCFYSKADDCVRIEHSSRRGHHYKMLLNDGFAYMEVPCKEGILYGVPNLVRPSEAVGIKRAPESGDFIRFYKGDTVKNIKTGRVYTIKQILGDGGGKLILTPVTETKPADLLSAKWGRLKVGGRNIHLLRLCAE

SEQ ID NO: 810 - protein, 1146 aa, Alicyclobacillus hesperidum
MAYRLGLDIGITSVGWAVVALEKDESGLKPVRIQDLGVRIFDKAEDSKTGASLALPRREARSARRRTRRRRHRLWRVKRLLEQHGILSMEQIEALYAQRTSSPDVYALRVAGLDRCLIAEEIARVLIHIAHRRGFQSNRKSEIKDSDAGKLLKAVQENENLMQSKGYRTVAEMLVSEATKTDAEGKLVHGKKHGYVSNVRNKAGEYRHTVSRQAIVDEVRKIFAAQRALGNDVMSEELEDSYLKILCSQRNFDDGPGGDSPYGHGSVSPDGVRQSIYERMVGSCTFETGEKRAPRSSYSFERFQLLTKVVNLRIYRQQEDGGRYPCELTQTERARVIDCAYEQTKITYGKLRKLLDMKDTESFAGLTYGLNRSRNKTEDTVFVEMKFYHEVRKALQRAGVFIQDLSIETLDQIGWILSVWKSDDNRRKKLSTLGLSDNVIEELLPLNGSKFGHLSLKAIRKILPFLEDGYSYDVACELAGYQFQGKTEYVKQRLLPPLGEGEVTNPVVRRALSQAIKVVNAVIRKHGSPESIHIELARELSKNLDERRKIEKAQKENQKNNEQIKDEIREILGSAHVTGRDIVKYKLFKQQQEFCMYSGEKLDVTRLFEPGYAEVDHIIPYGISFDDSYDNKVLVKTEQNRQKGNRTPLEYLRDKPEQKAKFIALVESIPLSQKKKNHLLMDKRAIDLEQEGFRERNLSDTRYITRALMNHIQAWLLFDETASTRSKRVVCVNGAVTAYMRARWGLTKDRDAGDKHHAADAVVVACIGDSLIQRVTKYDKFKRNALADRNRYVQQVSKSEGITQYVDKETGEVFTWESFDERKFLPNEPLEPWPFFRDELLARLSDDPSKNIRAIGLLTYSETEQIDPIFVSRMPTRKVTGAAHKETIRSPRIVKVDDNKGTEIQVVVSKVALTELKLTKDGEIKDYFRPEDDPRLYNTLRERLVQFGGDAKAAFKEPVYKISKDGSVRTPVRKVKIQEKLTLGVPVHGGRGIAENGGMVRIDVFAKGGKYYFVPIYVADVLKRELPNRLATAHKPYSEWRVVDDSYQFKFSLYPNDAVMIKPSREVDITYKDRKEPVGCRIMYFVSANIASASISLRTHDNSGELEGLGIQGLEVFEKYVVGPLGDTHPVYKERRMPFRVERKMN

SEQ ID NO: 811 - protein, 1552 aa, Anaerophaga sp.
MFSQRNNPYCELLQNVKQLYKEKFGKTNQVDNSIIYGFMKRILGLDLGTNSIGWALVENDENDRKGKIIGMGSRIIPMDMSELDNFNKGASISKTAERTRLRMTRRLRERHLLRRARLHRILNIMGFLPEHYRNSIDFIDKKGCFFEGQEPKIAYKPDKNSEQFCFLFTSSFHEMLEDFRKFQPELIQNRKKVPYDWTIYYLRKKALTQKISKEELAWIILNFNTKRGYYHLRGEDEDNQDNKKIKEFRALKVVNVTEREGANSSGKKWYDMELENGWVYSRQSNLPPNLEGKTIELIVSYTLDNNGNIKKDKNGKEKYSLSMPGEEDWNLVKIKTENDLKTSKKSVGEYIYDHLLKNPDQKIRGKLISTIERKFYKEELSRILKTQMNFYEELKNRELYQKCVEELYPNNKSHQQTLLQKDFIHLIVEDIIFYQRPLKSKRAFVNNCPLEYRVYVDKKSGELIKSGVKCIPKSHPLFQEFRLWQYVRNLRIYERERMVNGRLMVNVDVTNELLPDEEHIVRLFDLLNDRKSFKQDDVLRFVGIKSPKDRKRYSWNYPEDKELPGNETRHLILAWLKKVDGVPEDWLDPEKLKALWHLLYSVTDREEIIKGLHSFAKKYELPDTFVEHFKKIPRLEREYGSFSEKAIKKLLPLMRMGKYWKAEEIPADLLEKAQKIIDAEADDRISDEVREKLLHLKDISQLKGLPLWQASYLVYGRHSETGEVVKWRTSEDLEKYILQFKQHSLRNPVVEQVILEALRVVKDIWEHYGEGKEGFFNEIHVEIGRELKNPADKRKKITSQIQENENTNLRIKALLEELFNDPSVKNVRPYSPAQQEILRIYEDGVLNGQKEIPDDILKISKMARPSKSQLVKYKLWLEQKYRSPYTGEIIPLSQLFTSAYEIEHIIPQARYFDDSFSNKVICEAEVNREKGHQLAFEFITKRGGDEIELNFGKKVTILNVEEYQKFVKDHYGRSLRSLSKMRKLLMEDIPDDFIDRQLNDSRYISKVVRNLLSNIVRAEDENSLVSKHLITCTGGVTTRLKHEWGLNDVWNELITPRFVRLNKMGKEKFGEWINKKGKQVFQIQMPLELQKGFNKKRIDHRHHALDALVVACASRSHVNYLNNDSARANASETRYDLRNKLCYKDKTDSNGNYRWKFYKPWESFTEEAKNRLAGTVVSFKSNRRIMTRSSNRYFKWVDTSEGKKKKLVRQIKGDNQAIRKPLHKDTVLGKVSLRKEKKVSLSKAIDLWESIVDKPLKKRIQSLREQGYDKKLLLKYFKDRNNQFNGQDISRVNIYFFDNNLAARRVTLDASFNSEKRIDGITDSGIKKILYAHLQNEKYHGKKDEKGNEISPYELAFSPEGLEEMNANIKKLNGGKPHCPIYKVRLAETIGEKFKLGEKGNKNKKYVEAAKGTNLFFAVYVDEKGVRSFETIPFSVALERRKQKLAVVPEENENKEKLLFYLSPNDLVYVPDEDEKLIDYRQLSINPTRIYKMVSSSGTQCFFIPHFVASPIVQTMELGPNNKSERAWDGQMIKNVCYKLSVDRLGNVKIEK

SEQ ID NO: 812 - protein, 1515 aa, Anaerophaga thermohalophila
MKRILGLDLGTNSIGWALVESDEEQKSGKIQGIGSRIIPMDQNELDNFNKGNTVSQTAERTRLRMVRRLRERHLLRRERLHRVLKEIGFLPEHYLEQIDFTEKPGGFLPGKEPKIAYKPDNFKDKYDFLFQDSYHEMLSDFQDKNPEFIQKRKKVPQDWTIYYLRKKALTAKITKEELAWIILNFNQKRGYYQLRGEDEDVAKNTKKEEFHALKVVKVKEREDSEGASGKWYDIELENGWVYPRQSNIRPDWEGKILELIVTYNLDKDGNIKTDKEGNEKRSFRMPNKDDWTLRKKRTENEIEKSGKTVGEYIYDNLLDAPDLKIRGKLVSTIERKYYRSELEQILTAQKKYHPELSNSELFNKCISNLYPNNDIHRKALLSKDFVHLIINDIIFYQRPLKSKRSTVSNCPLEYRVYVDKVTGEKKKVPLKCIPKSHPLYQEFRLWQYVKNLRLFEKERFENGRLLTNVDVTEQFLPDEDKYVELFEFLNGRKTFKQDDILKFAGIKSAKDRVKYYWNYPQEKEYPGNETRYLIESRLKKIENVPDEWLNYEKIEELWHLLYSVTDKVEIEKGLQSFAAKYQLPDLFVEVFKGFPRMEREYGAFSKKAIKKLLPLMRMGKYWKLENINPDLIEKVQKIIDGEADDNINDGIRERFSEINEMSDLRGMPLWKASYLVYGRHSEAAEVIRWRTSADLDQYIKDFKQHALRNPIVEQVVLEALRVVKDVWNYFGEGREKFFDEIHVEIGRDLKNPADKRQKIANQIQENENTNLRIKALLVELFNDPEVQNVRPYSPVQQQLLKIYEDGVLNAERDIPDDIQKISRMANPTRNQLIRYKLWLEQKYRSPYTGEIIPLNKLFTSEYEVEHIIPRARYFDDSFSNKIISEAEVNRKKDRMLAFEFIKKLGGSTIDLNYGKKVSVLTVEEYQQFVKDHYGINPHSRLKMQKLLMDEIPESFIERQLNDSRYISKMVRNLLSNIVREENENSPVAKQLITCSGSITNTLKQEWGLNDVWNTIITPRFERLNKMGEQKYGEWVNKEGKPVFQIQMPLELQKGFNKKRIDHRHHALDALIVASATRSHVNYLSNEAAKTNAKDTRFDLRNRLCYKEKRGQNRNFTWRFYKPWNTFTEDAKNALNDIVVSFKSNHRVINKSTNRYFKWENLPGGMKKKRLVRQEKGDNWAIRQSLHKDTVLGKVSLRKVKPVSLSVALDSWNNIVDKALKKKIRSLKDQGYDKKLMLKYFKDRRNEYNGENISRVNVYYFDEEMAARRVDLDTSFNSEKRIEGITDSGIKKIIYAHLKNEKYHGQKDDKGKDISPYELAFSPEGIAEMNANIKQLNGGKPHCPIYKVRLAEPVGEKFQLGETGNKTEKLVEVAKGTNLFFGVYANDEGVRSFATVPFYLAVEREKQGLPAVPQENENGDQLLFWLSPNDLVYVPSEEDAHFANPKQIELDNSRIYKMVSSTGTQCFFIPHFVATPIVQTIELGPNNKSERAWDGQMIKKVCYKLSVDRLGNVEIE

SEQ ID NO: 813 - protein, 333 aa, Bacillus cereus
MMNPNNFTKEDFWRTIILYGLNQATYKIALGQSLIRFSEQQRNVVSMNELAEDFFDMYLERLKNGKPQLATPNRQTAMERIINSYNIGRLTRSQAIEKVEREAFNDVIDRFHTVDSLQVPMKFYEKTDKGIVIFDNVFEIFSDNNNFELRNELDARWDLLESAFEIKRTDSQLVNDIRKLYLANGYERTDITKNRSVLNGYQSNVCFYCGELMSDDDVHVDHVIPRQLINHDDIWNLVLSHGFCNQQKSDNLPDVNYIEKLIERNEYFIKSNHPISNKLKERLGNTPRRRRTTIDRIYEHAKLVLAPWKGIYGYNPATDPFYKTFIRNIVLSK

SEQ ID NO: 814 - protein, 1068 aa, Bacillus cereus
MRYVLGLDIGIASCGWAVINQEKERIEDLGVRIFDKAENPKDGKSLAAPRRDARSTRRTLRRKKHRMQRIKILLVKQGLLFKTELNHLYESATEFDVWNLRLDALERKLHPKEFARVLIHLAKRRGFKSNRKETTLSENGQILESISENQQIMEQQNYRTVGEMILKDKKFENHKRNKDGTYIGTVTRQQLQDEIQMIFHTQRLYKNDYATEEFESSYLEIWASQRPYASKDQIEKMIGYCTLEPKEKRTPKASWSFQYFVALQTINNLRLISKDKIEELSFEEKKQIMNLALEKPIVKYIDIRKLLSIPNDFQFNSLSYSADTVDTTLENKRCIELKEYHSINKVYKQVYGKNTPNLLPIDYDTIAYGLTIFKDDKDILEYLQNKYVNAKGKPIKNLAKKTYDDTFIQALLNLNFTKMGHLSFKALKNIIPFLEEGLSYDKACEKAGYNFKGTSYTERTKYLPVIPQNTNPVVHRALSQTRKVINAIIKKYGSPNAIHIETARELSKTFQERKEIDSRYQDNSKKNEHAIHKLKELGNINPSGINIVKFKLWSEQDGRCMYSGKYIEPHRLFEEGYTEVDHILPYSRSLDDSYNNKILTLGTENQRKGNKTPYEYMGNTSIWDEFETRVQSNKKINFKKQQKLLLQNFSYAREQEFIERNLNDTRYATIYLTSLIQQHLIFSESSSKKKVRTVSGIITSHLRSRWGFNKDRKEGHIHHALDAVIVAVTSNHMIQRVTKYYKLKELNKNLQAKQLPFPEPWEGFRLELEARISPNTQQYLKGIHFKNYADVNLSDIKPIFVSRMPKRSITGELHQETIRKFLGYNEKGKVLTAIKTKLEDIPFDANGDFPMYGKETDLYTYNAIKERYLSHEKDKRKSFQEPLYKPTKSGEIGPLIKSIKIMDTRTIVNPVNQGKGVVYNSKIARTDVFKKEDKYYLIPIYTIDLLKNILPHKAITAGKGYEDWTTIDSSFTFLFSLFPNDLIQIVPSKNKTIKARTTVSKKEILLPSLTGYFKGVHSGTAGITVETHDGSVIANVGSKQLLLFEKYQVDVLGHYTKIKEEKRMGMAI

SEQ ID NO: 815 - protein, 1078 aa, Bacillus cereus
MRYVLGLDIGIASCGWAVINQEKERIEDLGVRIFDKAENPKDGKSLAAPRRDARSTRRTLRRKKHRMQRIKVLLVKHGLLSKTELDHLYESATEVDVWNLRLDALERKLYPKEFARILIHLAKRRGFKSNRKETTLSENGQILESISENQQIMEKQNYRTVGEMILKDKKFENHKRNKNGTYVGTVTRQQLQDEIQMIFHAQRLYKNDYATEEFESSYLEIWASQRPYASKDQIEKMIGYCTLEPKEKRAPKASWSFQYFVALQTINNLRLISKDRIEELSFEEKKQIMNLALEKSIVKYIDIRKLLSVPNEFQFNSLSYSADTVDTAVESRKCIELKEYHSINKVYKQIYGENALNLLPKYYDTIAYGLTIFKDDKDILEYLQNKYVNAKGKPISNFANKTYDDTFIQALLNLNFTKMGHLSFKALKNIIPFLEEGLSYDKACEKAGYNFKGTSYTEQTKYLPVIPQNTNPVVHRALSQTRKVINAIIKKYGSPNAIHIETARELSKTFQERKEIDSMYQDNSKKNEHAIHKLKELGNINPSGINIVKFKLWNEQDGRCMYSGKYIEPHRLFEEGYTEVDHILPYSRSLDDSYNNKTLTLGTENQRKGNKIPYEYMGNTSIWNDFETRVQSNKKINKKKQQKLLLQHFSYAREQEFIERNLNDTRYATIYLSSLIQQHLIFSESSRKKKVHTVSGIITSHLRSRWGFNKDRKEGHIHHALDAVIVAVTSDHMIQRVTKYYKLKELNRNLQAKRMPFPEPWEGFRLELEARISPNTQQYLKGLRFKNYADVNLSEIKSIFVSRMPKHSITGELHQETIRKFIGYNEKGKVLTAIKTKLEDIPFDANGDFPMYGKESDLYTYNAIKERYLSHKKDKRKSFQEPLYKPTKSGGIGPLIKSIKIMDTRTIVNPVNQGKGVVYNSKIARTDVFKKEEKYYLIPIYTIDLMKNILPQKAITAGKGYEDWTTIDPSFTFLFSLFPNDLIQIVPSKNKTIKARTTVSKKEVLLPSLTGYFKGVHSGTAGITVETHDGSVIANVGSKQLLLIEKYQVDVLGNYTKIKEEKRIGLTTYNDNKKIAAC

SEQ ID NO: 816 - protein, 1088 aa, Bacillus smithii
MNYKMGLDIGIASVGWAVINLDLKRIEDLGVRIFDKAEHPQNGESLALPRRIARSARRRLRRRKHRLERIRRLLVSENVLTKEEMNLLFKQKKQIDVWQLRVDALERKLNNDELARVLLHLAKRRGFKSNRKSERNSKESSEFLKNIEENQSILAQYRSVGEMIVKDSKFAYHKRNKLDSYSNMIARDDLEREIKLIFEKQREFNNPVCTERLEEKYLNIWSSQRPFASKEDIEKKVGFCTFEPKEKRAPKATYTFQSFIVWEHINKLRLVSPDETRALTEIERNLLYKQAFSKNKMTYYDIRKLLNLSDDIHFKGLLYDPKSSLKQIENIRFLELDSYHKIRKCIENVYGKDGIRMFNETDIDTFGYALTIFKDDEDIVAYLQNEYITKNGKRVSNLANKVYDKSLIDELLNLSFSKFAHLSMKAIRNILPYMEQGEIYSKACELAGYNFTGPKKKEKALLLPVIPNIANPVVMRALTQSRKVVNAIIKKYGSPVSIHIELARDLSHSFDERKKIQKDQTENRKKNETAIKQLIEYELTKNPTGLDIVKFKLWSEQQGRCMYSLKPIELERLLEPGYVEVDHILPYSRSLDDSYANKVLVLTKENREKGNHTPVEYLGLGSERWKKFEKFVLANKQFSKKKKQNLLRLRYEETEEKEFKERNLNDTRYISKFFANFIKEHLKFADGDGGQKVYTINGKITAHLRSRWDFNKNREESDLHHAVDAVIVACATQGMIKKITEFYKAREQNKESAKKKEPIFPQPWPHFADELKARLSKFPQESIEAFALGNYDRKKLESLRPVFVSRMPKRSVTGAAHQETLRRCVGIDEQSGKIQTAVKTKLSDIKLDKDGHFPMYQKESDPRTYEAIRQRLLEHNNDPKKAFQEPLYKPKKNGEPGPVIRTVKIIDTKNKVVHLDGSKTVAYNSNIVRTDVFEKDGKYYCVPVYTMDIMKGTLPNKAIEANKPYSEWKEMTEEYTFQFSLFPNDLVRIVLPREKTIKTSTNEEIIIKDIFAYYKTIDSATGGLELISHDRNFSLRGVGSKTLKRFEKYQVDVLGNIHKVKGEKRVGLAAPTNQKKGKTVDSLQSVSD

SEQ ID NO: 817 - protein, 1069 aa, Bacillus thuringiensis
MNYDIGLRIGITSCGWSIINKDLERIEDLGVRVFEKAENPDGTASAAPRREARKSRRKHRRKKHRIERIKRLIVQHDLLSKKELDSLYLSPFNIDVWNLRVEALERKLDNREFARVLIHLVQRRGFQTIRKSVEIQEEGKLLENVSENERIMKVNGYKTVGEMFSKHEKFTHHKRNKDGSYTSVVTRSLLLKEIKTIFNSQRILGNVFSTQKLESDYLYIWGSQRPTLTYEQLMSMVGNCIYEKKEKRAPKTSWAFQYFSLLQKINKLKVSDDNTLRKLSKEERDIVIELAFKKKNVSFVDIRKALKLNDNTKFNHLTYSHVVETKKVEKATFIELKGYHLIKKQLKDRNVELTQELQPKDYDAIAAASTFFKNDIEFRDYLRNQYLDSNGKRKSNIANKVFEDKVIAAVFELNFSKVCHLSFKSLYKLIPHLEKGLDYKEAILCAGYNFRDENKRDKKLFLPVIQQETNPVVHRALTQARKVINAIIREYGSPNTIRFVVANDLAKTYKQRKELESTLKKNRAENEKIKTKLLSMGIINPTGMDIVKYKLWYEQSGICLYTGRQMELSSLFKPGYSIVNHIIPYNRSFDDTYHNRVLTLTETKYEKGNKIPFEYFGAEETCWNEYEKRVSTSKKIHDKKREKLLIRNFDIEYENEMISNNVFDTHYIGSYFEKYIDEHLQFKKSTKKQKVFSIHGNMVAHLHSRWGFNKNSREIYLNHAVDAAIVAVLTDQLIRNIADYYRRDNILEQKGSLKFPEPWKSFSIELEARISPQVRDLIKKLNLDSYLDVDILHIKPVFISKKPRRKVNGEAHKSTIRSLIGINEIGKTVTCIKTRLEDIPFDENGDFPMYGKDTDKYTYTAIKERYLEFNKDKEKAFSTPLYKLKRNGEPGNQIKSVKIIDTRNIVNKVNQGKGIAYNSNIIRVDVFSRDQKYYVVPIYLRDFIKGSLPNKIITAAKGFMQWPETDNSYTFLFSIFPNDLIKVVPKEGKFIKAKNENKENINLTEILGYFKGLDSSTGAFTLESHDGSLLARGIGTKNLLLIEKYQVDVLGRYNKVGNEERQDIKIQQN

SEQ ID NO: 818 - protein, 206 aa, Bacteroides cellulosilyticus
MKKILGLDLGCNSIGWALVNEAENTEEISSIIKLGVRVNPLTVDEMQNFEKGKSITTNADRTLKRSMRRNLQRYKLRRDTLIEVLKEHGFITDSTLLSEHGNKTTFETYRLRAKAAVEEISLEKFARVLLMINKKRGYKSSRKAKGSEDGVLIDGMDVARKLYEEGLTPGELCLQILEAGKKNLPDFYRSDLQNEFDRIWNFQKLV

SEQ ID NO: 819 - protein, 349 aa, Bacteroides coprosuis
MKKILGLDIGTNSVGWAVVNTNQEGEPSQIEKLGSRIIPMSQDILDKFGQGQTVSSTASRTDYRGIRRLRERSLLRRERLHRVLHILDFLPKHYADSIGWDPRNSKTYGKFLPGTEVKLAWVPTADGHQFLFYSTYLEMLEDLKQTQAQLFETSQTPVPLDWTIYYLRKKALTQPITKHELAWLLLHFNTKRGYYQRRGELEDTPTDKLVEYHALKVVDVEVDPEDQSKKPWYFVHLENGWIYKRQSSEPLDNWKGLVKEFIVTTHLDKEGKPKLDKEGEVRRSFSSPKEDDWTLVKKKTENDLEKSGLTVGAYIYQTLLNKPNQKIRGGLIKHIERNYYVEELEQILR

SEQ ID NO: 820 - protein, 1504 aa, Bacteroides coprosuis
MKKVLGLDIGTNSVGWAVVNQNDKGEFLSIEKIGSRIIPMSQDVMDKFGAGQTESSTAQRTQYRGVRRLRERSLLRRERLHRVLHILHFLPQHYDAAIGWNKKENKTYGKFLPGVEVNIPWVATDQGHQFIFMDSYAEMLKDLKQHQPHLFEKSSTPVPLDWTIYYLRKKALTQAISKEELAWILLNFNQKRGYYQLRGEEVEDNTKREEFYALKVVKVELDKDNTSAKTWYKVHLENGFIYPCPSDTPIDSWVGMVKDFIVTTTLEKDGSEKRTADGEIKRSFRAPKEDDWTLLKKKTESELEKSGKQVGAFIYDTLLSNPDQKIIGGLIKTIERKYYKKELEQILETQQKFIAELSDKKLFQACAEELYPLNDSHRENLLERDFKHLFVQDIIFYHRPLKTKKSLISNCTYEYRTFYKNGEKQISPIKCIAKSNPLFQEFRVWQFVQNLRILQRQRSEGDSIKYNVDVTAEFLKDENDIANLFTWLNERKVIKQDQLLKSYFKLKVNKETKELDYRWNYVDDKNKEYPCNATRTHILSFLEKCKEEKRIEDDRFVYSLWHLLYSVVEPIELRGALAKFAEREHLHPSFVDVFAQFPPLEKEYGSYSEKAIKRLLPLMRMGDYWHEDKIDVKTKQRIQRIIDGEADDDITHRSREKVENLRSITDFKGLPLWKAGYVVYNRHSESGELTKWKTPHELSNYIQNEFKQYSLRNPIVEQIVLETLRVVHDLWVKHGDFSEIHLELGRDIKNSSDKRKRMAERQQENENSRQRVLEMLIDLKKEAAFADLNPYSPSQQEKLRIVEDGVLRSNIEIPKDIEKITKSAKPTSRELTKYRLWLDQKYRSPYTGQPISLAQLFTSKYEIEHVIPQAKYFDDSFTNKVICESEVNKEKGSMLAHEFILKNGGSTVNVGGRQVQVLKNDAYVELINRLYGKNNPVKAKKLLAEDIDEVVGDFSERQLNDTRYISRVVQKLLSNIVREEDEQESTSKHVIGCSGQVTTALKKDWGLNDIWNKIIQPRFERLNEMTATEDYGVWQSPNHFQIRVPEEIQKGFTKKRIDHRHHAMDALVIACATRSHINYISNRSGQDRNAKFETTRTDLRSKLCYKENSSGNNYNYIFNKPWDTFTQDAHRALENIVVSHKQNLRVLTKTNNYTQFINKDGKKDLQKQVKGDHFAVRKPMHQETIYGRVSIRSIKEVALKKALENWKQIVDRTLKDKIRELIGAYGKYDAQTILKYFKDRDYKFNNLKINRVEVYEYDHNCAAVRKSIGDDLTIKQIERITDESIRKILMNHLSNYDDNLKEAFSPEGLMEMNKNIKELNGGKNHQPIYKVRLFEDLGSKFPLGVSHNNPDKYAIAAKGTNLFFGIYEDQEGKRMFDSIPLNIVIDRLKEKKSPVPETYNESKLKFHLSPNDLVYVPTDEEQKQPELVDVDHLSDEQKGRVYKAVSFTGNRAFFVNHRVSKVIHDYVEFGTKNKIENDDDKRSLKHICWKLKVNRLGEITDVKR

SEQ ID NO: 821 - protein, 1509 aa, Bacteroides eggerthii
MKTILGLDLGTNSVGWAVINSVIKEQAERIWIEMAGSRIIPMDAAVLGDFDKGNSISQTSERTRLRGARRLRERQLLRRERLHKVLNILGFLPNHYLEYIDFEKHPGKFLADAEPKLAWVKDEQGKYTFLFQAAFDEMLADFAIHQPSLVSGDKKIPYDWTIYYLRKKALTEMISKEELAWILLNFNQKRGYYQLRGEEEEDNAGKSVEFYALKVLTVEATDEKKGRDVWYNVHLENGWIYRRSSSVPLDWEGQVKEFIVTTDLNPDGTPKLDKYGEVKRSFRAPKEDDWMLIKKRTEADIANTHKTVGAYIYDTLLQKPQQKIIGKLVKTVERKLYRDELSLILQKQCAFHAELQDRALYARCVEALYPSNEVRRKNIANRDFVYLLMDDILFYQRPLKTKKSLIANCPYEENEYVDRETGEIKKTPLKCIAKSHPLFQEFRLWNFLSNIRIYQKEKEINGTLHLDVDVTAEFLKTEDDYVALFDWLNSRKEIEQKTFLKYPKFGLKKEISNYRWNYVEDKQYPCNETRHAILSSLEKANVCIDFLSNEKEVALWHILYSVSDKQEIEKALRTFAAKNGLDESFVEAFKKFPPFKSEYGAYSAKAIKKMLPLMRCGKYWDVSSIDDTTKERIKKIVTGEYDERISVKVRDKVMNLSDISCFRRLPLWLACYIVYNRHSEDKEAVKWESPADIDAYLASFKQHSLRNPIVEQVITETLRVVRDIWKQVGRIDEIHIELGREMKNPADKRKRMTAQILENENANLRIKALLAEFMNPEYEIENVRPYSPSQQEILRIYEDTVLHAEDQLPEEIDAILKKFNSSKVPTKSEFLRYKLWLEQKYRSPYTGELIPLGKLFTAAYEIEHVIPQSRYFDDSFSNKVICESAVNKLKDNQLGYEFIKNHHGQKVEVGFGKSVEIFSVDSYERFVKEQYAKSAVKMKKLLMDDIPEQFIERQLNDSRYISKVIKGLLSNIVREKNDSGEYEPEAVSKNIVVCTGSVTDRLKRDWGMNDVWNSIVYPRFERLNSLTDTQSFGHWENKSGKKVFQTELPLEYQKGFSKKRIDHRHHAMDAIVIACATRNHVNYLSNESASRNAKISRYDLQRLLCDKNRTDDNGNYKWVIKKPWDTFTQDAREVLSKIVVSLKQNLRIINKTTNVYRHLDATGNRVYEKQKTGDSWAIRKPMHKDTVFGAVNLRKVKVVRLSVALDTPAMIVDKRVKNKVFELLSYKYDKKRIEKYFKENAFLWKELDLAKVAVYYFTEATTEPLVAVRKPLDSTFNEKKIKESVTDTGIQKILLNHLCTKEGKPDLAFSAEGIEEMNRNLLQLNNGKSHQPIYKVRVYEPRGNKFSVGVLGNKGTKWVEAAKGTNLFFAIYITEDGKRTYETIPLNVVIEREKQGLVPVPDRNKKGDKLLFWLSPNDLVYLPTEEEREFGRINEPIDRGRIYKMVSCTGNEGHFIPANVANPIVPVIELGSNNKAQRAWTNEMIKDICIPIKVDRLGHIIEVKYRIDE

SEQ ID NO: 822 - protein, 1526 aa, Bacteroides faecis
MKKILGLDLGTNSIGWAVLNAADDNSLKYIEAAGSRIIPMDAAILGDFDRGNSISQTAERTRIRGMRHLRERYLLRRARLHRILNLLGFLPFHYAQDIDRYGNFSADMEPKIAWCKNLEGELEFIFIESFNEMLEDFRKNQPELVADNKKVPYDWVIYYLRKKALEKKISKEELAWILLNFNQKRGYYQLRGEDDDESMKTAKTRQYFDKQIIKNIIDTNQTYKGQRILIVELQNGDKGKIFKKEIPDWIGQEKNIIVTVDIDKDGNDKYEESGSLSCRFKIPTDAEWESEWKLIKMKTQKDLDESNKTVGTYIYDSILQNPTQKVRGKLVRTIERKYYKAELKQILEKQTEFHSELQDKDLYIECLNELYSNNDTHRNAITDRDFVYLFMNDILFYQRPLKSKKSLIDNCPYERNIYIDKETGEIKYSPIKCIAKSHPLFQEFRLWKFISSIRIYQRESVVEVVDKQLDLFSSQSTSVQKLVTDVDVTDKFLTCENDYVALFEWLNKKKIIDQKEFLKYRPFGLKGDIDNYRWNYVEDKSYPCNETHAMILTYFAKAGISEDILTKEMEEALWHILYSVEDRQEITKALRTFASKYHLSDSFVKVFSNIPPFKKEYGSYSAKAIKKLLSLMRMGKYWSEDAIDVNTRERIDKIVTGEYDEKIRDRVREKTIRLNDIRHFRALPDWLACYVVYDRHSETREITEWKSPEEIDEYIRNFKQHSLRNPIVEQVITETLRTVRDIWKQVGCIDEIHVELGREMKNPADKRKRITSQIIENENANLRVKALLTEFVNSEFEIENVRPYSLSQQDILRIYEDGVLNSVAEVPGDIAGILKKFNENDAKKRPTTSEILRYKLWLEQKYRSPYTGEMIPLSKLFTSAYEIEHVIPQSRYFDDSFSNKVICEAEVNKLKDNALGYEFIKKHHGEKVELGFGKIVEIFSVSVYEQFVKDNYSRNRGKMKKLLMDEIPEQFIERQLNDSRYISKVVKTLLSNVVREKAEQEAVSKNVIVCTGGVTDRLKKDWGINDVWNKIVLPRFLRLNELTNSTNFTAKNAAGNEIPAMPLELQKGFNKKRIDHRHHAMDAIVIACANRNIVNYLNNESASRKAKISRHDLQAILCDKVRTDDKGNYQWRVKKPWDTFTQDVYVALENIIVSFKQNLRVINKTSNYYWHYENGKKVLVKQVKGDSWAIRKPMHKDTVFGEVNLRKVKSVSLNEALKNPQFIVEKDLKRQLLSLLQQNFDIKKIKKYFEEHKDIWSDISLSKMNIYYFTKETKDRYFATRKPLDASFDKKKIESCITDTGIQQILLRHLELKENDPERAFSPDGIDEMNRNIIQLNKGKGHHPIAKVRVYEKADKFEVGQRGNKSSKFVEAAKGTNLFFAVYETEYPDEKTNSIVRKRNYATIPLNIAIERQKRGLSTAPEDEKGNVPSFVLSPNDLVYLPTSEDIVNGHITQPIDKSRIYKMVSSSGSQCFFIKHNIANIIVDKYEFSPLNKMERAISNEMIKEICIPVKVDRLGNIVKLGKSE

SEQ ID NO: 823 - protein, 1509 aa, Bacteroides fluxus
MKTILGLDLGTNSVGWAVINSVIKEQAERIWIEMAGSRIIPMDAAVLGDFDKGNSISQTSERTRLRGVRRLRERQLLRRERLHKVLNILGFLPNHYLEYIDFEKHPGKFLSDAEPKLPWVKDEQGKYTFLFQAAFDEMLADFAIHQPSLVSGDKKIPYDWTIYYLRKKALTEMISKEELAWILLNFNQKRGYYQLRGEEEEDNAGKSVEFYALKVLTVEATDEKKGRDVWYNVHLENGWIYRRSSSVPLDWEGQIKEFIVTTDLNPDSTPKLDKYGEVKRSFRAPKEDDWMLIKKRTEADIANTHKTVGAYIYDTLLQKPQQKIIGKLVKTVERKLYRDELSLILQKQCAFHAELQDRTLYARCVEALYPNNEVQRRNIANRDFVYLLMDDVLFYQRPLKTKKSLIANCPYEENEYVDRETGEIKKAPLKCIAKSHPLFQEFRLWNFLSNIRIYQKEKEINGTLHLDVDVTAEFLKTEDDYVALFDWLNSRKEIEQKTFLKYPKFGLKKEISNYRWNYVEDKQYPCNETRHAILSRLEKANVCIDFLSNEKEVALWHILYSVSDKQEIEKALRTFAAKNGLDESFVEAFKKFPPFKSEYGAYSAKAIKKLLPLMRCGKYWDVSSIDDTTKERIKKIVAGEYDERIAVKVRDKVMNLSDISCFKRLPLWLACYIVYNRHSEDKEAVKWESPADIDAYLASFKQHSLRNPIVEQVITETLRVVRDIWKQVGRIDEIHIELGREMKNPADKRKRMTAQILENENANLRIKALLAEFMNPEYEIENVRPYSPSQQEILRIYEDMVLHAEDQLPEEIDAILKKFNSSKVPTKSEFLRYKLWLEQKYRSPYTGELIPLGKLFTAAYEIEHVIPQSRYFDDSFSNKVICESAVNKLKDNQLGYEFIKNHHGQKVEVGFGKSVEIFSVDSYERFVKEQYAKSAVKMKKMLMDDIPEQFIERQLNDSRYISKVIKGLLSNIVREKNDSGEYEPEAVSKNIVVCTGSVTDRLKRDWGMNDVWNSIVYPRFERLNSLTDTQSFGHWENKSGKKVFQTELPLEYQKGFSKKRIDHRHHAMDAIVIACATRNHVNYLSNESASRNAKISRYDLQRLLCDKSRTDDNGNYKWVIKKPWDTFTQDAREVLSKIVVSLKQNLRIINKTTNVYRHLDATGNRVYEKQKTGDSWAIRKPMHKDTVFGAVNLRKVKVVRLSVALDAPTMIVDKRVKNKVFELLSYKYDKKRIEKYFKENAVLWKELDLARVAVYYFTEATTEPLVAVRKPLDSTFNEKKIKESVTDTGIQKILLNHLCTKEGKPDLAFSAEGIEEMNRNLLQLNNGKRHQPIYKVRVYEPRGNKFSVGVLGNKGTKWVEAAKGTNLFFAIYITEDGKRTYETIPLNMVIEREKQGLAPVPDKNEKGDKLLFWLSPNDLVYLPTEEELEFGRINEPIDRGRIYKMVSSSGNQCFFIPQSISNAIIPTKELGANNKAERSWDGAMIKNICIPVKVDRLGRIIEVKYRINE

SEQ ID NO: 824 - protein, 1436 aa, Bacteroides fragilis; identical to SEQ ID NO: 155

SEQ ID NO: 825 - protein, 1512 aa, Bacteroides nordii
MKNILGLDLGTNSIGWAVINSEEDGPIVKKRIELAGSRIIPMDAAVLGNFDSGVTKSQTAERTSFRSIRRLRERQLLRRERLHKVLQILGFLPEHYVNDIDFENHPGKIKRNTEPKLPWRKNSMGQFEFIFQDSFEAMLTDFATHQPVFVSEGKKVPYDWTLYYLRKKALTEGISKEELAWLILNFNQKRGYYQLRGEEEEEQSNKLVEFYALRVVKVEATDDKKGKDTWYNVHLENGWIYRRTSNIPLDWEGKVKEFIVTTDLNEDGTPKLDKYGEVKRSFRAPKEDDWTLIKKKTESDIANSHKTVGCYIYDALLQNPHQKIKGRLVRTVERKFYKEELRLILEKQLSFHPELQDRDLYRACIDALYVSNEAHKNNISGRDFVYLFIDDIIFYQRPLKTKKSLIDNCPYEENQYMDRETGEVKQAPIKCIAKSHPLFQEFRLWQFISNIRIYQRERVLDDGKLETDVDVTPDFLKTEDDYTTLFEWFNDRKEVDQKAFLKNPQFGLKKTFTEYRWNYVEDKSYPCNETRNAILNGLQKAGVSADFLSREVEEALWHILYSVEDKIEIESALRKFASKHDLDDRFADVFKKLPPFKKEYGAYSAKAIKKLLPLMRIGKYWELSNIDDKTKERIDKIITGEWDENIHDRVREKAIKLSDITDFKGLPLWLSCYVVYNRHSEARAIAKWESPEDIDSYLRLFRQHSLRNPIVEQVITETLRTVRDIWKRVGQIDEIHVELGREIKNPADKRAKMTAQIVENENTNLRIKALLAEFINSEYEIENVRPYSSNQQEKLKIYEDTVLNGVKEIPEDINTILKKFRESDLKKRPTKSDFLHYKLWLEQKYCSPYTGRIIPLGKLFTSAYEIEHIIPQAHYFDDSFSNKVICEAEVNGLKDKKLGYEFIKHNPGKMVEIGFGKPPVRIFSVEEYERFVKENYSGIKNKMNKLLMDDIPETFIERQLNDSRYISKVVKSLLSNIVREKDSNGEYEPEAISKNVIVCTGSVTDRLKRDWGVNDVWNSIIYPRFERLNELTGSQQFGCWENKEGKRVFQTAVPLEMQKGFSKKRIDHRHHAMDAIVIACATRNHINYLSNESASKKAKISRTDLQRLLCTKCRTDDNGNYKWIVKKPWPAFTQDIRKALENITVSFKQNLRVINKTTNYYVHFDESGKKVLEKQINGDSWAIRKPMHKDTVFGKVNLQKVKEVRLSLALDTPKMIVDKKLKEKVLQLYSYKYDKKRIDKYFKENASLWKDLNLSKVAVYYFTNDSTEPLVAVRKPLDTSFNAKKIKESVTDTGIQKILLNHLSNNQDDPNLAFSPDGIDKMNKNLTALNDGKYHQPIYKVRVCEPQGNKFSVGTSGNKTSKYVEAAKGTNLFFAVYQTEDGKRSYETIPLNVVIEREKLGWTPVPENNNNGDKLLFWLSPNDLVYVPTADELNNGMRLDNMDKGRIYKMISCSGPQCFFIPQNVSNAIIPVIELGANNKAEKSWNNEMIKVVCVPIRVDRLGCITQINNQK

SEQ ID NO: 826 - protein, 779 aa, Bacteroides oleiciplenus
MKEGNQYDVACEYAGYRHSKSSLTREEIDNKVLKNRLEILPKNSLRNPVVEKILNQMVNVVNAVIDTYGKPDEIRVELARELKKGAKEREELAKSIAQNTREHEAIRQLLQTEFGMMHVTRNDIIRYKLYEELKDNGYKTLYSDQYIPREKVFSKEIDIEHIIPQARLFDDSLSNKTLEYRAVNIEKGNKTAYDFVKEKYGNDGLRRYLNHCEALFKDKKTKLKKLKMEDQDIPDGFIDRDLRNTQYIAKKALSMLSEISRRVVATTGSITDELRKDWQLVDIMKELNLPKYEALGFVETFKDKDGRIIKKIKDWSKRNDHRHHAMDALTVAFTKDVFIQYFNNKNAFWMSGSKEHANITAIKNKYFEKGKALAPIPLELFRTEAKHHLENILVSIKAKNKVVTNNINRTKKKNGENLKLQQTPRGQLHLESIYGSYRQCIIRDEKVNASFDASKIANVSKSAYRNALLKRLEAYDNDPKKAFTGKNSLDKNPVYLDENKMEKVPDRVKIVEFETVYTIRKPIDPKLSIDKVVDARIRTLLKKRLEEYGGDAQRAFSNIEENPIWLNKEKGISVKRVAIRGISNAQALHDKKDKDGNPILDKEGKGIPTDFVNTSNNHHVAIYRKPVVDKMGQVILDENGSPRYELGEDVISFFEAVARVNLRQPVVDKDYKRSEGWQFLFSMKQNEYFVFPNEKTGFNPKEIDLLNPENYALISPNLFRVQKIGLNDYTFRHHLETSIQNNSNELKFITWIRCGKNGINGVIKVRVNHIGQIVSMGEY

SEQ ID NO: 827 - protein, 653 aa, Bacteroides oleiciplenus
MKKILGLDLGSSSIGWALVNEGANDEEKSSIIKLGVRVNPLTVDEAQNFEKGKSITTNADRTLKRGMRRNLQRYKQRREALVEVLKKHEFITAGTLMSEQGNKTTFETYRLRAKAVEEEISLEEFARVLLMINKKRGYKSSRKAKGDEDGVLIDGMDVAKKLYDEDLNPGELCLQLLEAGKKTLPDFYRSDLQDEFDKIWNFQKQFNPESFCDTAKEEVRGKNRTQTWTILSKYFVWTEGDSVWNNEEARTEERIKEYKLVGIKRTTKGYEQKLENYRWRVQALSEQLNPEIIAIVLQEINGQISASSGYLGAISDRSKELFFNHQTVGQSLMSELDKNPNGSLRNKVFYRQDYLDEFNTIWEKQSLYHKELTVELKKEIRDIIIFYQRRLKSQKGLISTCEFEQREIIVEKDGKRKTKIIGCKVIPRSHPLFQEFKIWQTLNDVEVYVADRRTKRKQDRKSTTLFSDTEDILLVEGKRYLYQEEKELLAKELFVRENMKKAEVLKLLFEDPKELDLNFKQIDGNRTGFALFSAYSKMIEKYGYESVNFKNSADEIIEKLQIIFADLGWNTELFSIDLSKDDKELEKQPYFRLWHLLYSFEGDNTPTGNGKLIEALMRLCSVEKEYASVLANVSFQEDYGSLSAKAIKKYYLI

SEQ ID NO: 828 - protein, 1436 aa, Bacteroides sp.
MKRILGLDLGTNSIGWALVDEAENKDERSSIVKLGVRVNPLTVDELTNFEKGKSITTNADRTLKRGMRRNLQRYKLRRETLMEVLKEHKLITEDTILSENGNRTTFETYRLRAKAATEKISLEEFARVLLMINKKRGYKSCRKAKGAEEGTLIDGMDIARELYNNNLTPGELCLQLLDAGKKYLPDFYRSDLQNELDRIWEKQKEYYPEILTEVLKEELRGKKRDAVWAICAKSFVWEEYYTEWNKEKGKTEQQEREHKLEGIYSKRKRDEAKRENLQWRVNGLKEKLSLEQLVIVLQEMNIQINNSSGYLGAISDRSKELYFNKQTVGQYQMEMLDKNPNASLRNMVFYRQDYLDEFNTLWEKQAEYHKELTGELKKEIRDIVIFYQRRLKSQKGLVGFCEFESRQIEVEIDGKKKIKTVGNRVIPRSSPLFQEFKIWQILNNIEVTVVGKKGKRRKQKDNSPTLFDGLDDTEQLELNGSRYLYQEEKELLAQELFVRDKMTKSDVLKLLFDNPQELDLNFKTIDGNKTGYTLFQAYSKMIEMSGHEPVDFKKTVEKVVEHVKAVFDLLNWNTDILGFNSNEELDNQSYYKLWHLLYSFEGDNTPTGNARLVQKITELYGFEKEYAIILANVTFQDDYGSLSAKAIHKILPHLKEGNRYDVACAYAGYKHSESSLTKEEIANKALKDRLTLLPKNNLRNPVVEKILNQMVNVINAIIDTYGKPDEIRVELARELKKNAKEREELTKFIAETTRKHEEFKILLQSEFGLTNVSRTDILRYKLYKELESCGYKTLYSNTYIPREKLFSKEFDIEHIIPQARLFDDSFSNKTLEARSINLEKGNKTAYDFVKEKFGESGADNSLDHYLNNIEDLFKSGKISKTKYNKLKMAEQDIPDGFINRDLRNTQYIAKKALSMLNEISRRVVATSGTITDKLRQDWQLVDVMKELNWEKYKALGLVEYFEDKDGRQIGRIKDWTKRNDHRHHAMDALTVAFTKDIFIQYFNNKNASLNSNTNEYAIKNKYFQNGRAIAPIPLREFRVEAKKHLENTLISIKAKNKVVTGNINKTKKRGGVNKYLQQTPRGQLHLETIYGSGKQYLTKEEKVNASFDMKKIATVSKSAYRDVLLKRLHENDNDPKKAFTGKNSLDKQPIWLDKEQTRKVPEKVKTVTLETIYTVRKEISPDLKVDKVIDAGVRKILTGRLNEYGNDAKKAFSNLDENPIWLNKEKGISIKRVTISGISNAQSLHVKKDKDGKPILDEDSRNIPVDFVNTGNNHHVAVYRRPVIDKRGQLVIDEAGNPKYELEEVVVSFFEAVTRANLGQPIIDKDYKTSEGWQFLFSMKQNEYFVFPNEKTGFNPKEIDLLDAENYGVISPNLFRVQKFAHKNYVFRHHLETTIKDTSSILKGITWIDFRSSKGLDAIVKVRVNHIGQIVSVGEY

SEQ ID NO: 829 - protein, 1510 aa, Bacteroides sp.
MKRILGLDLGTNSIGWALVDSEEQRILGMGSRIIPMDQGVLDTFSGGNPVETQTAARTAYRGTRRLRERALLRRERLIRVLNMMKFLPEHYASQIDFEKRLGQFFDEKEPKLAWKQNDEGRFEFIFQQSFNEMIEEFKNKGVVREDKKIPYDWTIYYLRKKALSQEIEKEELAWILLNFNQKRGYYQLRGEEEEENPNKLVEYYSLKIVDVIADEKPNSKGDIWYSLHLENGWIYRRSSKIPLFGWKDKTRDFIVTTDLNDDGTVKKDKEGIEKRSFRAPSENDWVLLKKKTESDIEKSHKTVGAYVYETLLQNPMQKVRGKLVRTIERKFYKDELKQILEKQREFHPELRDEDLYNDCVRELYRSNETYQFILSKRDFVHLFLDDILFYQRPLRSQKSAIGDCILEFKTYKDKDGNNIKEYLKVISKSNPLYQEFRIWQWLYNLKIYRKEDDEDVTLQFIANIEDKEQLFDFLSNRKSIEQKPLLEYLIKAKGLKKQVKTEAYRWNYVEDKIYPCSETKTMISTRLAKVENIPDNFFTKEIEQKLWHIIYSVTDKNEFEKALRTFAKKYDLDIASFVDNFKKIPPFKNEYGSFSEKAIKKLLPLMRLGKYWKWNDIDNNTQNRISKIITGEYDEEIKDIVREKSIALTNENDFQGLQLWLAQYLVYGRHSEADIAGKWHSVADLEKYLNEFKQHSLRNPIVEQIITETLRVVRDIWRKYGQGAENFFSEIHVELGRDMKNTADERKKIVNVVTENENTNLRIKALLMELKNNSDGKLEVENVRPYSPTQQDILKIYEEYAISTGLDNEKDEKVKEDIKKISRVAQPTTTELQRYKLWLEQKYCSPYTGKVIPLGKLFTEEYQIEHIIPKSRYYDDSFSNKVICEAAVNKLKDKCLGLEFIKNYHGQIVETGFGQKVTIFDEEAYQNFVKQHYAYNRSKRTKLLLEEIPEKMIERQMNDTRYISKFVLPLLSNLVRAEENDNGVNSKNVLPVNGKITTMLKQDWGLNDVWNDLILPRFVRMNELAKTIAFTSWNEQHQKYLPTVPLELSKGFQKKRIDHRHHAMDALVIACATRDHVNLLNNKHANTDTIRYDLQRKLRLFERVTYIDPQTKNNVTKDIPKEFKKPWDNFTVDARNELEKIIVSFKQNLRIINKATNIYTKYENGKKIKVGQKGLNWAIRKPLHKETVFAKVSLRKRKTVRLSEALKDWKKIVDKKLKQEIKRLTCQYGKFDVDTILRYFKDRKYQFGEVDVSKVKMYYFDEENAAVRKNVDTSFTEKFIQGSVTDTGIQKILLNHLEAKGNKVEIAFSPEGIEEMNKNIIQLNEGKLHLPIFKVRVYETIGNKFSVGVKGNKKDKYVEAAKGTNLFFAIYVDENGIRSYETIPLNIVIERLKQGLSVVPEKNRKEHSLLFYLSPNDLVYVPIEDERENIHAVNLDQLNNEQRKRIYKMVSCTGSECHFVPYYVASPIVNKVEYSSLNKIGRSLTGEMIKDVCIKLKVDRLGNVKGISGL

SEQ ID NO: 830 - protein, 1436 aa, Bacteroides sp.
MKRILGLDLGTNSIGWALVNEAENKDERSSIVKLGVRVNPLTVDELTNFEKGKSITTNADRTLKRGMRRNLQRYKLRRETLTEVLKEHKLITEDTILSENGNRTTFETYRLRAKAVTEEISLEEFARVLLMINKKRGYKSSRKAKGVEEGTLIDGMDIARELYNNNLTPGELCLQLLDAGKKFLPDFYRSDLQNELDRIWEKQKEYYPEILTDVLKEELRGKKRDAVWAICAKYFVWKETYTEWNKEKGKTEQQEREHKLEGIYSKRKRDEAKRENLQWRVNGLKEKLSLEQLVIVFQEMNTQINNSSGYLGAISDRSKELYFNKQTVGQYQMEMLDKNPNASLRNMVFYRQDYLDEFNMLWEKQAVYHKELTEELKKEIRDIIIFYQRRLKSQKGLIGFCEFESRQIEVDIDGKKKIKTVGNRVISRSSPLFQEFKIWQILNNIEVTVVGKKRKRRKLKENYSAIFEELNDAEQLELNGSRRLCQEEKELLAQELFVRDKMTKSEVLKLLFDNPQELDLNFKTIDGNKTGYALFQAYSKMIEMSGHEPVDFKKPVEKVVEYIKAVFDLLNWNTDILGFNSNEELDNQSYYKLWHLLYSFEGDNTPTGNGRLIQKMTELYGFEKEYATILANVSFQDDYGSLSAKAIHKILPHLKEGNRYDVACVYAGYRHSESSLTREEIANKVLKDRLMLLPKNSLHNPVVEKILNQMVNVINVIIDIYGKPDEIRVELARELKKNAKEREELTKSIAQTTKANEEYKTLLQTEFGLTNVSRTDILRYKLYKELESCGYKTLYSNTYISREKLFSKEFDIEHIIPQARLFDDSFSNKTLEARSVNIEKGNKTAYDFVKEKFGESGADNSLEHYLNNIEDLFKSGKISKTKYNKLKMAEQDIPDGFIERDLRNTQYIAKKALSMLNEISHRVVATSGSVTDKLREDWQLIDVMKELNWEKYKALGLVEYFEDRDGRQIGRIKDWTKRNDHRHHAMDALTVAFTKDVFIQYFNNKNASLDPNANEHAIKNKYFQNGRAIAPMPLREFRAEAKKHLENTLISIKAKNKVITGNINKTRKKGGVNKNMQQTPRGQLHLETIYGSGKQYLTKEEKVNASFDMRKIETVSKSAYRDALLKRLYENDNDPKKAFAGKNSLDKQPIWLDKEQMRKVPEKVKIVTLEAIYTIRKEISPDLKVDKVIDVGVRKILIDRLNEYGNDAKKAFSNLDKNPIWLNKEKGISIKRVTISGISNAQSLHVKKDKDGKPILDENGRNIPVDFVNTGNNHHVAVYYRPVIDKRGQLVVDEAGNPKYELEEVVVSFFEAVTRANLGLPIIDKDYKTTEGWQFLFSMKQNEYFVFPNEKIGFNPKEIDLLDVENYGLISPNLFRVQKFSLKNYVFRHHLETTIKDTSSILRGITWIDFRSSKGLDTIVKVRVNHIGQIVSVGEY

SEQ ID NO: 831 - protein, 1424 aa, Bacteroides sp.
MKRILGLDLGTNSIGWALVNEAETDEEVSSIIRLGVRVNPLTVDETQNFEKGKSITTNAERTLKRSMRRNLQRYKLRRDALVEFLKELGFITDETILSEQGNRTTFETCRLRAKAAEEEISLEELSRVLLMINKKRGYKSSRKVKKEEDGVLIDGMEIAKKLYEEDLTPGQLCSQLLESGKKVLPDFYHSDLQEELDRIWSVQKQFHPDVFCDAAKEEIKGKNRSQTWAILANYFVWKEEVVGWNDREAKNETIEKECKLVGLKRTTKGYELKKENYRWRAQALTEQLGLEEIAVVLQEINGQINASSGYLGAISDRSKVLYFNHQTVGQYQMAELDKNPHASLRNMVFYRQDYLDEFDRIWEKQAEFHKELTAELKKEIRDMIIFYQRRLKSQKGLISFCEFERLEIVVEKDGKKQTKVIGCKVIPRSHPLFQEFKVWQTLNDIKVLGREKKRNALSASESRALYPEEKEILARELAIKENMKKADVLKLLFENPQELDLNFKQIDGNRTGFSLFSAYSKMIEKYGYEPLDFKKPADEIIGQLRTIFTDLGWNTNLFTIDLTKEGKELEMQPYFRLWHLLYSFEGDNTSTGNGKLIEKIMQLCGVEKEYAVELASLSFQDDYGSLSAKAIKRILPYLKEGNLYDVACEYAGYRHSKSSLTKEEIENKVLKGKLEVLPKNSLRNPVVEKILSQMVNVINTIIDTYGKPDEIRVELARELKKSAKEREELTKAIAKSTREHEEIRKLLQDEFGMMNVSRNDIIRYKLYEELKDNGYKTLYSNQYIPKEKIFSKEIDIEHIIPQSRLFDDSLSNKTLEYKAINIEKGNKTAYDFVKEKYGEEGLQQYINRCESLFNDKKAKLRKLKMEQKDIPDGFIDRDLRNTQYIAKKALAMLNEICRRVVATTGSITDQLREDWQLVDVMKELNLPKYEALGFVETYEDKDGRKIKRIKDWTKRNDHRHHAMDALTVAFTKDAFIQYFNNKNAAQDSGNRNHTNIIGIKTRYFDKGRALPPIPLEQFRIEAKQHLEKLLVSIKAKNKVVTVNVNRTKKRKGENTKIQQTPRGQLHLETVYGSHKQYVTKIEKVNASFDAAKIATVSKRAYRNALLKRLETFGNDPKKAFTGKNALEKNPLYADKYQTIRVPEKVQTVEFETIYTIRKPVDPALNVDKVVDVKVRAILERRLKEYGGDPKKAFVNFWENPIWLNKEKGISIKRVSIRGINNAQSIHVKKDKNGNPIWDENGKQIPVDFVNTGNNHHVAIYRKPVLDKKGQVTFDEDGNLMYELDEVVVPFFEAVTRANLGLPIIDKDYRKSEGWQFLFSMKQNEYFVFPNEKTGFNPKEVDLLNPDNYAMISPNLFRVQTMSKVMYGNNVVRDYKFRHHLETTVKDMKELKDIAYKQYKTLSFGNSVVKIRINHIGQIVSVGEY

SEQ ID NO: 832 - protein, 1055 aa, Bacteroides sp.
MRIYRKDLAQDVDVTNELLKTEEDYVALFDWLNGKKEIDQKAFLKYPLFGLKKEVENYRWNYVQDKPYPCNETRSSMLARLEKCDISIEFLTKENEEALWHILYSVEDKNEIVKALQKFADKHDLNASFVDVFQKFPPFKKEYGSYSAKAIKKLLPLMRMGKYWSENSIDKGTRERMDKIITGEYDEKIENRVREKAIHLADVSDFKGLPLWLVCYIVYGRHSEAKEITQWKSPADIDLYLRSFKQHSLRNPIVEQIIIETLRVVRDIWKQVGNIDEIHVELGREMKNPADKRKKMTQQMSENENTNLRIKYLLTEFLNPEYEVENVRPYSPSQQDILRIYEEGVLNSVSDLPEEISDILKKFTETDLKKRPSRSEVLRYKLWLEQKYRSPYTGEVIPLGKLFTPAYEIEHVIPQSCYFDDSFSNKVICEAEVNKLKSNLLGHEFIVKHHGEIVELPFGKKVRIFTVDEYEQFVKDNYSRTRSKMKKLLMDDIPEEFVARQLNDSRYISKVVKSLLSNIVREKGEEEAISKNVIPCTGGVTDRLKKDWGINEVWNKIILPRFQRLNELTGTNKFTTKNVGIQEIPTMPLELQKGFNKKRIDHRHHAMDAIIIACANRNIINYLNNESATAKAELSRYDLQKMLCDKAKTDNNGNYKWVIRKPWASFTQDTYLALENIIVSFKQNLRVINKATNHFLHYNEEGKKIFVKQGKGDNWAIRKSMHKDTVFGEVNLRRIKTVALNEAMKNPQSIVVKDFKRKLLELWNLGFDAKRIKKYFEDNRETWSDINLSKIEVYYFSKDTKDRFFATRKPLDTSFDRKKIENNITDTGIQKILLRHLELKDNNPDIAFSPDGIDEMNRNIIQLNNGKYHQPIIKVRWYEQADKFAVGQTGNKSSKFVEAAKGTNLFFAVYESNILDKKTNTIIKKRNYATIPLNVAIERQKQGLPVAPEDENGNDPIFVLSPNDLVYLPTAADLANGIIAQPLDRGRIYKMVSCTGNEGYFIPARIANPILQTIELGSNNKAQKAWTDEMIKEICMPIKVDRLGNVLESSSSYKK

SEQ ID NO: 833 - protein, 1055 aa, Bacteroides sp.
MRIYRKDLAQDVDVTNELLKTEEDYVALFDWLNGKKEIDQKAFLKYPVFGLKKEIENYRWNYVQDKPYPCNETRSLMLARLEKCDISIEFLTKENEEALWHILYSVEDKNEIVKALQKFADKHDLNASFVDVFQKFPPFKKEYGSYSAKAIKKLLPLMRMGKYWSENSIDKGTRERIDKIITGEYDEKIENRVREKAIHLADVSDFKGLPLWLVCYIVYGRHSEAKEIIQWKSPADIDSYLRSFKQHSLRNPIVEQIIIETLRVVRDIWKQVGNIDEIHVELGREMKNPADKRKKMTQQMSENENTNLRIKYLLTEFLNPEYEVENVRPYSPSQQDILRIYEEGVLNSVSDLPEEISDILKKFTETDLKKRPSRSEVLRYKLWLEQKYRSPYTGEVIPLGKLFTPAYEIEHVIPQSCYFDDSFSNKVICEAEVNKLKSNLLGHEFIVKHHGEIVELPFGKKVRIFTVDEYEQFVKDNYSRTRSKMKKLLMDDIPEEFVTRQLNDSRYISKVVKSLLSNIVREKGEEEAISKNVIPCTGGVTDRLKKDWGINEVWNKIILPRFQRLNELTGTNKFTTKNVGIQEIPTMPLELQKGFNKKRIDHRHHAMDAIIIACANRNIINYLNNESATAKAELSRYDLQKMLCDKAKTDNNGNYKWVIRKPWASFTQDTYLALENIIVSFKQNLRVINKATNRFLHYNEEGKKIFVKQGKGDNWAIRKSMHKDTVFGEVNLRRIKTVALNEAMKNPQSIVVKDFKRKLLELWNLGFDAKRIKKYFEDNRETWSDINLSKIEVYYFSKDTKDRFFATRKPLDTSFDRKKIENNITDTGIQKILLRHLELKDNNPDIAFSPDGIDEMNRNIIQLNNGKYHQPIIKIRWYEQADKFAVGQTGNKSSKFVEAAKGTNLFFAVYESNILDKKTNTIIKKRNYATIPLNVAIERQKQGLPVAPEDENGNDPIFVLSPNDLVYLPTDDELANGIIAQPLDRGRIYKMVSSSGEQCFFIKHIVANVLVDKFEFSPLNKMERALTGEMIKMICIPIKVDRLGNVLESSSSYKK

SEQ ID NO: 834 - protein, 286 aa, Bacteroides uniformis
MLSYKYDKKKIEKYFKENAFLWKELDIAKVAVYYFTENTTEPLVAVRKSLDSTFNEKKIASVTDTGIQKILLNHLKSKEGKAELAFSAEGIEEMNRNLLQLNDGKGHQPIYKVRVYEPRGNKFKVGVLGNKGAKWVEAAKGTNLFFAIYITEDGNRTYETIPLNWVIEREKQGLVPVPDRNEKGDKLLFWLSPNDLVYLPTEEERDFGRINEPIDRGRIYKMVSSSGNQCFFIPQSISNAIISTKELGSNNKAEKSWDGEMIKNICIPVKVDRLGRIIEVKYRVNE

SEQ ID NO: 835 - protein, 1508 aa, Bacteroides uniformis
MRTILGLDLGTNSIGWAVINSVIKEQTERIWIEMAGSRIIPMDAAILGDFDKGNSISQTAERTRFRGVRRLRERQLLRRERLHKVLKILGFLPEHYLKGIDFEKHTGKFLSGSEPKLPWVKDRWGKYSFLFQTAFNEMLADFAKHQPSLVFDGKKIPYDWTVYYLRKKALTEMISKEELAWILLNFNQKRGYYQLRGEEEEDNAGKSVEFYALKVLSVEATDEKKGRDIWYNVHLENGWVYRRSSNVPLDWEGRVKEFIVTTDLNPDGTPKLDKYGEVKRSFRAPKEDDWMLIKKRTEADITGTHKTIGSYIYDALLQEPQQKIIGKLVKTVERKFYKEELNFILQKQCAFHAELQDRDLYMRCIEALYPGNEVQRRNIANRDFIYLLIDDVLFYQRPLKTKKSLIANCPYEENEYVNRKTGEIKTAPLKCIAKSHPLFQEFRLWYFLSNIRVYQKEREVNGTLHLDVDVTTEFLKTEDDYVALFDWLNSRKEIDQKAFLRYPAFGLKKEINNYRWNYVEDKFYPCNETRHAILSRLEKAGIGIDFLSDEKETALWHILYSVSDKQEIEKALATFAVKNGLNESFVEVFKKFPPFKSEYGAYSAKAIKKLLPLMRCGKYWDMSLIDGTTKERIERIIAGECDESIGAKVREKAMNLSDISCFKRLPLWLACYVVYNRHSEDKEITKWETPADIDAYLAAFKQHSLRNPIVEQVITETLRVVRDIWKQVGKIDEIRIELGREMKNPADKRKRMTTQILENENANLRIKALLAEFVNPEYGVENVRPYSPSQQEILRIYEDAVLKGEEQIPEDIDVILKKFNTSKLPTKSEFLRYKLWLEQKYRSPYTGELIPLAKLFTAAYEIEHVIPQSRYFDDSFSNKVICESAVNKLKDNQLGYEFIKNHHGQKVEVGFGKTVEIFSVDSYERFVKEQYAKSGIKMKKLLMDDIPEQFIERQLNDSRYISKVVKGLLSNIVREKNDSGEYEPEAVSKNILVCTGSVTDRLKKDWGMNDVWNSIVSPRFERLNALTETQCFGHWENKDGKKVFQTAVPLEYQKGFSKKRIDHRHHAMDAIVIACATRNHVNYLNNESASRNAKISRYDLQRLLCDKSRGDGNGNYRWIIKKPWTTFTQDAREALSGIIVSLKQNLRIINKTTNIYQHFDANGTRVYEKQKIGDSWAIRKPMHKDTVFGAVNLRKVKVVRLSVALDTPSMIVNKRVKNKVLELLSYKYDKKKIEKYFKENAFLWKELDIAKVAVYYFTENTTEPLVAVRKSLDSTFNEKKIASVTDTGIQKILLNHLKSKEGKAELAFSAEGIEEMNRNLLQLNDGKGHQPIYKVRVYEPRGNKFKVGVLGNKGAKWVEAAKGTNLFFAIYITEDGNRTYETIPLNWVIEREKQGLVPVPDRNEKGDKLLFWLSPNDLVYLPTEEERDFGRINEPIDRGRIYKMVSSSGNQCFFIPQSISNAIISTKELGSNNKAEKSWDGEMIKNICIPVKVDRLGRIIEVKYRVNE

SEQ ID NO: 836 - protein, 1210 aa, Bacteroides uniformis
MRTILGLDLGTNSIGWAVINSVIKEQTERIWIEMAGSRIIPMDAAILGDFDKGNSISQTAERTRFRGVRRLRERQLLRRERLHKVLKILGFLPEHYLKGIDFEKHTGKFLSGSEPKLPWVKDRWGKYSFLFQTAFNEMLADFAKHQPSLVFDGKKIPYDWTVYYLRKKALTEMISKEELAWILLNFNQKRGYYQLRGEEEEDNAGKSVEFYALKVLSVEATDEKKGRDIWYNVHLENGWVYRRSSNVPLDWEGRVKEFIVTTDLNPDGTPKLDKYGEVKRSFRAPKEDDWMLIKKRTEADITGTHKTIGSYIYDALLQEPQQKIIGKLVKTVERKFYKEELNFILQKQCAFHAELQDRDLYMRCIEALYPGNEVQRRNIANRDFIYLLIDDVLFYQRPLKTKKSLIANCPYEENEYVNRKTGEIKTAPLKCIAKSHPLFQEFRLWYFLSNIRVYQKEREVNGTLHLDVDVTTEFLKTEDDYVALFDWLNSRKEIDQKAFLRYPAFGLKKEINNYRWNYVEDKFYPCNETRHAILSRLEKAGIGIDFLSDEKETALWHILYSVSDKQEIEKALATFAVKNGLNESFVEVFKKFPPFKSEYGAYSAKAIKKLLPLMRCGKYWDMSLIDGTTKERIERIIAGECDESIGAKVREKAMNLSDISCFKRLPLWLACYVVYNRHSEDKEITKWETPADIDAYLAAFKQHSLRNPIVEQVITETLRVVRDIWKQVGKIDEIRIELGREMKNPADKRKRMTTQILENENANLRIKALLAEFVNPEYGVENVRPYSPSQQEILRIYEDAVLKGEEQIPEDIDVILKKFNTSKLPTKSEFLRYKLWLEQKYRSPYTGELIPLAKLFTAAYEIEHVIPQSRYFDDSFSNKVICESAVNKLKDNQLGYEFIKNHHGQKVEVGFGKTVEIFSVDSYERFVKEQYAKSGIKMKKLLMDDIPEQFIERQLNDSRYISKVVKGLLSNIVREKNDSGEYEPEAVSKNILVCTGSVTDRLKKDWGMNDVWNSIVSPRFERLNALTETQCFGHWENKDGKKVFQTAVPLEYQKGFSKKRIDHRHHAMDAIVIACATRNHVNYLNNESASRNAKISRYDLQRLLCDKSRGDGNGNYRWIIKKPWTTFTQDAREALSGIIVSLKQNLRIINKTTNIYQHFDANGTRVYEKQKIGDSWAIRKPMHKDTVFGAVNLRKALIPQHYNLTLFISS

SEQ ID NO: 837 - protein, 1504 aa, Bacteroides vulgatus
MKNIVGLDLGTNSIGWAVVNGSVNDDGSEQLVKIQASGSRIIPMDAAMIGDFNKGNSISQTAERTRLRGVRRLSERYLLRRERLHRILDILGFLPFHFAQDLDRHGKIVKGKEPKLAWRKNEAGQFEFIFQDSFKEMLEDFKLNHPNLITDDKKVPYDWTIYYLRKKGLTSKISKEELAWILLNFNQKRGYYQLRGEEEEENKNKLVEFYALKVVAVEDSGEKKGKDIWYNVHLENGWVYRRTSNMPLDWVGKTKEFIVTTDLEKDGTPKKDKEGNVKRSFRAPKEDDWSLLKKKTEADIDQTHKTVGVYIYDTLLGNPSQKIRGRLVRTIERKYYKEELKQILEKQKEFHLELQDRALYAACIEELYPINEAHRNNVGNRDFTYLFLEDILFYQRPLKSKKSLIDNCPYEENQGLDKETGEIKSFPVKCIAKSHPLFQEFRLWQFIVNLRIYRKDLAQDVDVTNELLKTEEDYVALFDWLNGKKEIDQKAFLKYPVFGLKKEIENYRWNYVQDKPYPCNETRSLMLARLEKCDISIEFLTKENEEALWHILYSVEDKNEIVKALQKFADKHDLNASFVDVFQKFPPFKKEYGSYSAKAIKKLLPLMRMGKYWSENSIDKGTRERIDKIITGEYDEKIENRVREKAIHLADVSDFKGLPLWLVCYIVYGRHSEAKEITQWKSPADIDSYLRSFKQHSLRNPIVEQIIIETLRVVRDIWKQVGNIDEIHVELGREMKNPADKRKKMTQQMSENENTNLRIKYLLTEFLNPEYEVENVRPYSPSQQDILRIYEEGVLNSVSDLPEEISDILKKFTETDLKKRPSRSEILRYKLWLEQKYRSPYTGEVIPLGKLFTPAYEIEHVIPQSCYFDDSFSNKVICEAEVNKLKSNLLGHEFIVKHHGEIVELPFGKKVRIFTVDEYEQFVKDNYSRTRSKMKKLLMDDIPEEFVTRQLNDSRYISKVVKSLLSNIVREKGEEEAISKNVIPCTGGVTDRLKKDWGINEVWNKIILPRFQRLNELTGTNKFTTKNVGIQEIPTMPLELQKGFNKKRIDHRHHAMDAIIIACANRNIINYLNNESATAKAELSRYDLQKMLCDKAKTDNNGNYKWVIRKPWASFTQDTYLALENIIVSFKQNLRVINKATNRFLHYNEEGKKIFVKQGKGDNWAIRKSMHKDTVFGEVNLRRIKTVALNEAMKNPQSIVVKDFKRKLLELWNLGFDAKRIKKYFEDNRETWSDINLSKIEVYYFSKDTKDRFFATRKPLDTSFDRKKIENNITDTGIQKILLRHLELKDNNPDIAFSPDGIDEMNRNIIQLNNGKYHQPIIKIRWYEQADKFAVGQTGNKFSKFVEAAKGTNLFFAVYESNILDKKTNTIIKKRNYATIPLNVAIERQKQGLPVAPEDENGNDPIFVLSPNDLVYLPTDDELANGIIAQPLDRGRIYKMVSCTGNEGHFIPARIANPILQTIELGSNNKAQKAWTDEMIKEICMPIKVDRLGNVLESSSSYKK

SEQ ID NO: 838 - protein, 1153 aa, Barnesiella intestinihominis
MKNILGLDLGLSSIGWSVIRENSEEQELVAMGSRVVSLTAAELSSFTQGNGVSINSQRTQKRTQRKGYDRYQLRRTLLRNKLDTLGMLPDDSLSYLPKLQLWGLRAKAVTQRIELNELGRVLLHLNQKRGYKSIKSDFSGDKKITDYVKTVKTRYDELKEMRLTIGELFFRRLTENAFFRCKEQVYPRQAYVEEFDCIMNCQRKFYPDILTDETIRCIRDEIIYYQRPLKSCKYLVSRCEFEKRFYLNAAGKKTEAGPKVSPRTSPLFQVCRLWESINNIVVKDRRNEIVFISAEQRAALFDFLNTHEKLKGSDLLKLLGLSKTYGYRLGEQFKTGIQGNKTRVEIERALGNYPDKKRLLQFNLQEESSSMVNTETGEIIPMISLSFEQEPLYRLWHVLYSIDDREQLQSVLRQKFGIDDDEVLERLSAIDLVKAGFGNKSSKAIRRILPFLQLGMNYAEACEAAGYNHSNNYTKAENEARALLDRLPAIKKNELRQPVVEKILNQMVNVVNALMEKYGRFDEIRVELARELKQSKEERSNTYKSINKNQRENEQIAKRIVEYGVPTRSRIQKYKMWEESKHCCIYCGQPVDVGDFLRGFDVEVEHIIPKSLYFDDSFANKVCSCRSCNKEKNNRTAYDYMKSKGEKALSDYVERVNTMYTNNQISKTKWQNLLTPVDKISIDFIDRQLRESQYIARKAKEILTSICYNVTATSGSVTSFLRHVWGWDTVLHDLNFDRYKKVGLTEVIEVNHRGSVIRREQIKDWSKRFDHRHHAIDALTIACTKQAYIQRLNNLRAEEGPDFNKMSLERYIQSQPHFSVAQVREAVDRILVSFRAGKRAVTPGKRYIRKNRKRISVQSVLIPRGALSEESVYGVIHVWEKDEQGHVIQKQRAVMKYPITSINREMLDKEKVVDKRIHRILSGRLAQYNDNPKEAFAKPVYIDKECRIPIRTVRCFAKPAINTLVPLKKDDKGNPVAWVNPGNNHHVAIYRDEDGKYKERTVTFWEAVDRCRVGIPAIVTQPDTIWDNILQRNDISENVLESLPDVKWQFVLSLQQNEMFILGMNEEDYRYAMDQQDYALLNKYLYRVQKLSKSDYSFRYHTETSVEDKYDGKPNLKLSMQMGKLKRVSIKSLLGLNPHKVHISVLGEIKEIS

SEQ ID NO: 839 - protein, 1352 aa, Belliella baltica
MKKILGLDLGTTSIGWAFIKEPEKDVVGSEIVDMGVRIVPLSSDEENDFAKGNTISINADRTLKRGARRNLQRFKQRRNALLEIFKEKKLISTNFKYAEDGPSSTFSTLNLRAKAAKEKIELQDLVKVLLQINKKRGYKSSRKAKSEEDDGSAIDSMGIAKELYENDLTPGQWVYEALQKGRKNVPDFYRSDLQEEFKKIVNYQSEFFPDIFNASFVEDWMGKASTPTKQYFNKKGVQLAENKGKREERRLQEYKWRAEAVNFKIDLSEIALILSQINSQISNSSGYLGAISDRSKELYFKNLTVGQYLYQQIKKNPHTRLKGQVFYRQDYLDEFERIWSVQSSFYPQLNDALKREVRDITIFFQRRLKSQKHLISNCEFEDHHKVVPKSHPVFQEFRIWQNLNNLLLIKKDNLNEKFDLELESKIALANELAFKRELNVKDALKILGLKPNEWEFNFTKIEGNRTNQAFFDAFAKIIELEDGEPIDLGDLKADDILDQFSEAFLRIGIDTELLQVNSDIEGAEYEKQSYIQFWHLLYSSEDDQKLKLNLIRKFGFKPEHAKILASISLQDDHASLSSRAIKKILPHLQSGLIYDKACTYAGYNHSSSFTKDENEKRELRAELELLKKNSLRNPVVEKILNQMINVVNAILKDPELGRPDEIRVEMARELKANAEQRKNMTSNIASATRDHDKYREILKSEFGLKRVTKNDLLRYKLWLETDGISLYTGKPIEASKLFSKEYDIEHIIPKARLFDDSFSNKTICERQLNIDKANVTAFSFLQNKLSADEFEQYQSRVKSLYGKLSKAKIQKLLMANDKIPEDFIARQLQETRYISKKAKEILFEISRRVSVTTGTITDKLREDWGLVEIMKELNWEKYDKLGLTYTIEGKHGERLNKIKDWSKRNDHRHHAMDALTVALTKPAYIQYLNNLNAKGLNNKKGTEVFAIEQKYLKRENGKLCFIPPIENIRSEAKKHLSRILVSYKAKNKVVTINKNKTKSKAGLNEQIALTPRGQLHKETVYGKSFHYSTKFEKIGASFNVQKINTVAKKEEREALLKRLAENGNDPKKAFTGKNTLNKMPIYLDLGKNIKLSEKVKTVVLEQNYTIRKNIDPDLKVDKVIDVGIKRILESRLEEFGGNAKLAFSNLEENPIWLNKEKGISIKRVKISGVSNVESLHVKKDHFGEPILDQEGNEIPVDFVSTGNNHHVAIYEDENGNLQEEVVSFFEAVVRQNQGLPIIKKNHTLGWKFLFTLKQNEYFVFPSDDFVPADVDLMDEQNYHLISPNLFRVQKIARKNYVFNNHLETKAVDNDLLKSKKELSKITYHFYQTPEHLRGIIKIRINHLGKIIQIGEY

SEQ ID NO: 840 - protein, 1415 aa, Bergeyella zoohelcum
MKHILGLDLGTNSIGWALIERNIEEKYGKIIGMGSRIVPMGAELSKFEQGQAQTKNADRRTNRGARRLNKRYKQRRNKLIYILQKLDMLPSQIKLKEDFSDPNKIDKITILPISKKQEQLTAFDLVSLRVKALTEKVGLEDLGKIIYKYNQLRGYAGGSLEPEKEDIFDEEQSKDKKNKSFIAFSKIVFLGEPQEEIFKNKKLNRRAIIVETEEGNFEGSTFLENIKVGDSLELLINISASKSGDTITIKLPNKTNWRKKMENIENQLKEKSKEMGREFYISEFLLELLKENRWAKIRNNTILRARYESEFEAIWNEQVKHYPFLENLDKKTLIEIVSFIFPGEKESQKKYRELGLEKGLKYIIKNQVVFYQRELKDQSHLISDCRYEPNEKAIAKSHPVFQEYKVWEQINKLIVNTKIEAGTNRKGEKKYKYIDRPIPTALKEWIFEELQNKKEITFSAIFKKLKAEFDLREGIDFLNGMSPKDKLKGNETKLQLQKSLGELWDVLGLDSINRQIELWNILYNEKGNEYDLTSDRTSKVLEFINKYGNNIVDDNAEETAIRISKIKFARAYSSLSLKAVERILPLVRAGKYFNNDFSQQLQSKILKLLNENVEDPFAKAAQTYLDNNQSVLSEGGVGNSIATILVYDKHTAKEYSHDELYKSYKEINLLKQGDLRNPLVEQIINEALVLIRDIWKNYGIKPNEIRVELARDLKNSAKERATIHKRNKDNQTINNKIKETLVKNKKELSLANIEKVKLWEAQRHLSPYTGQPIPLSDLFDKEKYDVDHIIPISRYFDDSFTNKVISEKSVNQEKANRTAMEYFEVGSLKYSIFTKEQFIAHVNEYFSGVKRKNLLATSIPEDPVQRQIKDTQYIAIRVKEELNKIVGNENVKTTTGSITDYLRNHWGLTDKFKLLLKERYEALLESEKFLEAEYDNYKKDFDSRKKEYEEKEVLFEEQELTREEFIKEYKENYIRYKKNKLIIKGWSKRIDHRHHAIDALIVACTEPAHIKRLNDLNKVLQDWLVEHKSEFMPNFEGSNSELLEEILSLPENERTEIFTQIEKFRAIEMPWKGFPEQVEQKLKEIIISHKPKDKLLLQYNKAGDRQIKLRGQLHEGTLYGISQGKEAYRIPLTKFGGSKFATEKNIQKIVSPFLSGFIANHLKEYNNKKEEAFSAEGIMDLNNKLAQYRNEKGELKPHTPISTVKIYYKDPSKNKKKKDEEDLSLQKLDREKAFNEKLYVKTGDNYLFAVLEGEIKTKKTSQIKRLYDIISFFDATNFLKEEFRNAPDKKTFDKDLLFRQYFEERNKAKLLFTLKQGDFVYLPNENEEVILDKESPLYNQYWGDLKERGKNIYVVQKFSKKQIYFIKHTIADIIKKDVEFGSQNCYETVEGRSIKENCFKLEIDRLGNIVKVIKR

SEQ ID NO: 841 - protein, 1430 aa, Bergeyella zoohelcum
MKHILGLDLGTNSIGWAVVKEAQNDNEQSEIVDVGVRVNPLTTDEKTNFEKGKPISTNADRTLKRSARRNLQRYKLRRKELIELLKEHQLISTDTILTENGKGTTFQTLELRAKSAKEKISLEELARVFLTINKKRGYKSSRKAKNEDEGQLIDGMEIAKRLYEENLTTGQLSLQLLKEGKKSLPDYYRSDLQFELDKVWNFQKQFHSDILTDEFYAQLKGKGQRATSALFLAKYQIYTAENKGSREDKKLQAYQWRVDALSKELTREQLAFVITEINNNLNNSSGYLGAISDRSKELYFNNETVGEYLWKQIAANPHTSLKNQVFYRQDYLDEFEQIWKTQSAFYPEILTDELKKELRDVVIFYQRKLKSQKSLVSFCEFENKEIEIKKEDGTSTKKVIGLKVAPKSSPLFQEFKIWQNLNNVLIRKKGSKTKKVAKNQQAVLFEEEKTISELDLEAKQALFNELNLKGNLKADYCLEILGYSPKEWEMNYSVLEGNRTNKALYEAYLKITDLEGYDAKNHLKVKLNKDEVELDDLKVPASEIKDMVQAIFKEAGINTDILHFNAELDGKDFENQASYQLWHLLYSYEGDDSKSGNELLYKLLETKFGFKKEYAQILANVSLSDDYGSLSTKAMRKIHPYIKENKFSTACELAGYRHSKHSLTKEENDNRVLKDSLEVLKKNSLRQPVVEKILNQMINLVNALLKKYRTENPNFKFDEIRIELARELKKNAEERANMTANINKAKTEHEKIIKILKNEFGLPNPTRNDIIRYRLYEELKANGYKDLYTNIKIPQEKLFTKEIDIEHIIPKSRVFDDSFSNKTLSFRKTNLDKGERTAFDYMESKFGADKLEEYVARVEDLYKNNIISKAKYQKLLKKESEIGDGFVERDLRETQYIAKKAKEILLQITPNVLSTSGGITDRLREDWDLINVMKELNLPKYRALGLTQMEDRKYGQQVEVITDWTKRNDHRHHAMDALTVAFTKHNHIQYLNYLNARKNEKHKEHSNIMGIQQLETIKVTDKNGNEKRVFKAPMPNFRQVTKAFLENILISHKAKNKVVTKNKNKVAGSNKVQEVLTPRGQLHKETVYGKYQYYVQKEEKIGAKFDLETIKKVANPLYQSLLKKRLEENGGDPKKAFTGKNSLAKNPIYLDDTQTEQLPEKVKLVWLENSFSIRKDITPENFKDEKLIDKILDEGVKRILKERLQSFGNDAKKAFSDLDKNPIWLNKEKGITIKRVTISGVANAEPLHTKKDHLGKEILDKEGKPIPVDFISTGSNHHVAVYRDEKGNLQEKVVSVFEAVVRANQGLPIIDKTYNQHLGWEFLFTMKQNEMFVFPNESTGFNPNDIDLLDPKNKRIISPNLFRVQKFSKLQYGNSFVREFVFRHHLETTVEDRKELQGITYKQMKNSTFFNDIIKVRINHLGDIVSIGEY

SEQ ID NO: 842 - protein, 1281 aa, Bifidobacterium bifidum
MEDDSQHDIREIYLAIHHMVKYRGNFLVEGTLESSNAFKEDELLKLLGRITRYEMSEGEQNSDIEQDDENKLVAPANGQLADALCATRGSRSMRVDNALEALSAVNDLSREQRAIVKAIFAGLEGNKLDLAKIFVSKEFSSENKKILGIYFNKSDYEEKCVQIVDSGLLDDEEREFLDRMQGQYNAIALKQLLGRSTSVSDSKCASYDAHRANWNLIKLQLRTKENEKDINENYGILVGWKIDSGQRKSVRGESAYENMRKKANVFFKKMIETSDLSETDKNRLIHDIEEDKLFPIQRDSDNGVIPHQLHQNELKQIIKKQGKYYPFLLDAFEKDGKQINKIEGLLAFRVPYFVGPLVVPEDLQKSDNSENHWMVRKKKGEITPWNFDEMVDKDASGRKFIERLVGTDSYLLGEPTLPKNSLLYQEYEVLNELNNVRLSVRTGNHWNDKRRMRLGREEKTLLCQRLFMKGQTVTKRTAENLLRKEYGRTYELSGLSDESKFTSSLSTYGKMCRIFGEKYVNEHRDLMEKIVELQTVFEDKETLLHQLRQLEGISEADCALLVNTHYTGWGRLSRKLLTTKAGECKISDDFAPRKHSIIEIMRAEDRNLMEIITDKQLGFSDWIEQENLGAENGSSLMEVVDDLRVSPKVKRGIIQSIRLIDDISKAVGKRPSRIFLELADDIQPSGRTISRKSRLQDLYRNANLGKEFKGIADELNACSDKDLQDDRLFLYYTQLGKDMYTGEELDLDRLSSAYDIDHIIPQAVTQNDSIDNRVLVARAENARKTDSFTYMPQIADRMRNFWQILLDNGLISRVKFERLTRQNEFSEREKERFVQRSLVETRQIMKNVATLMRQRYGNSAAVIGLNAELTKEMHRYLGFSHKNRDINDYHHAQDALCVGIAGQFAANRGFFADGEVSDGAQNSYNQYLRDYLRGYREKLSAEDRKQGRAFGFIVGSMRSQDEQKRVNPRTGEVVWSEEDKDYLRKVMNYRKMLVTQKVGDDFGALYDETRYAATDPKGIKGIPFDGAKQDTSLYGGFSSAKPAYAVLIESKGKTRLVNVTMQEYSLLGDRPSDDELRKVLAKKKSEYAKANILLRHVPKMQLIRYGGGLMVIKSAGELNNAQQLWLPYEEYCYFDDLSQGKGSLEKDDLKKLLDSILGSVQCLYPWHRFTEEELADLHVAFDKLPEDEKKNVITGIVSALHADAKTANLSIVGMTGSWRRMNNKSGYTFSDEDEFIFQSPSGLFEKRVTVGELKRKAKKEVNSKYRTNEKRLPTLSGASQP

SEQ ID NO: 843 - protein, 1121 aa, Bifidobacterium dentium
MSVGLAAIEVDETGFPIRILNIQSVIHDGGIDPQLGKKKSISRKAISGVARRTRRMRRRKVVRLRQLDATLESLGFPIVEPDSLDTWEIWLTRAKLASSYIQDDETRKEDVSIALRHIARHRGWRNPYSNVESLFVDVAPSEQYEELRRKAEEKLGTSLSGNPTSAEIVECILKRQVGEVQLRTRSRKGVNGNAVEKEGLLPTKLMQSDNAAEIRRIFKVQRIDDETGRKLLRAVFKACSPKGSVERRVGRDALAPGLPRALKASLAFQEYRIANVLTNLVISEDGTKRKLTIAEKQRVFGFLSSNETDDITWIDVAEKLGLERRQIQGVGCLTADGEERISSTPPRNITALHIHSAKPVIREKLVAWWKAASPTVRETMVELLSNTVDIDRVREDMDYSSAVAFIDSLGDEELTALDSVDLLSGRAAYSRQTLKQLTERMLNTDDDLHEARKAVFGVDDNWKPPVDAISTSVGNPAVDRVLKIVNRYLLACQKRWRNPQSVQIEHVRESFSSVAKAKETERVQGERARYRNDLRRELCEQEGLNKIRESDIRRWESVQRQNGTCLYCGSPITFRTCEMDHIVPRKGVGSTNTRVNLAAACAACNKLKSNTAFSVWARTEGAANRKVSQRDAIERVKTFIFNKSVPPREQRAFKQAVISRLRQAESDPAIDNRSIESVAWMADELHRRIEAYFNQDADVSGNTPATQVWVFQGRVTALARKASGIEGRIHFAGEWKKTRLDRRHHAVDAAVIAMMNHSAAQTLVERDSLRLSQWITRKPETWKNYPFSEGQKKTRFKEWLDCMNALLDLLNDALDSDRVPVTRCQRMSLGNSQAHAATIRKMKRVELFSPMDADLIRRASTPALYCALTRLPEYSPEKGLPENRGREIVLNGRHIRSTETVDFFASGAAQLMVRNGSAEIGDSIHHMRIYRYRKTGAKSQEYVYGMIRVFQIDLLHASSENLFAVQLPSQSVSVRYGDKNVVQAIQEGRAEYLGHIVPNDEILISYEGVRMKDSEKIGAYANDFSGTASELAQRRHWVVVGSDVSKLALRPSYLSEEGLENSGSESERLSKQTRKVIEGKGWVVAVNILAKYHPVVIRRNALGEPRFRTNSGMPVSWRWDR

SEQ ID NO: 844 - protein, 354 aa, Bifidobacterium longum
AKQYVNSASIDDAEAETMKTTVSVFQGRVTASARRAAGIEGKIHFIGQQSKTRLDRRHHAVDASVIAMMNTAAAQTLMERESLRESQRLIGLMPGERSWKEYPYEGTSRYESFHLWLDNMDVLLELLNDALDNDRIAVMQSQRYVLGNSIAHDATIHPLEKVPLGSAMSADLIRRASTPALWCALTRLPDYDEKEGLPEDSHREIRVHDTRYSADDEMGFFASQAAQIAVQEGSADIGSAIHHARVYRCWKTNAKGVRKYFYGMIRVFQTDLLRACHDDLFTVPLPPQSISMRYGEPRVVQALQSGNAQYLGSLVVGDEIEMDFSSLDVDGQIGEYLQFFSQFSGGNLAWKHWV

SEQ ID NO: 845 - protein, 1124 aa, Bifidobacterium longum
LTGHSGHTFWPTSSSPPIQLEQEKRPLPQRNTSQNGHTFWPITRERCFMRGKRYRIGIDVGLNSVGLAAVEVSDENSPVRLLNAQSVIHDGGVDPQKNKEAITRKNMSGVARRTRRMRRRKRERLHKLDMLLGKFGYPVIEPESLDKPFEEWHVRAELATRYIEDDELRRESISIALRHMARHRGWRNPYRQVDSLISDNPYSKQYGELKEKAKAYNDDATAAEEESTPAQLVVAMLDAGYAEAPRLRWRTGSKKPDAEGYLPVRLMQEDNANELKQIFRVQRVPADEWKPLFRSVFYAVSPKGSAEQRVGQDPLAPEQARALKASLAFQEYRIANVITNLRIKDASAELRKLTVDEKQSIYDQLVSPSSEDITWSDLCDFLGFKRSQLKGVGSLTEDGEERISSRPPRLTSVQRIYESDNKIRKPLVAWWKSASDNEHEAMIRLLSNTVDIDKVREDVAYASAIEFIDGLDDDALTKLDSVDLPSGRAAYSVETLQKLTRQMLTTDDDLHEARKTLFNVTDSWRPPADPIGEPLGNPSVDRVLKNVNRYLMNCQQRWGNPVSVNIEHVRSSFSSVAFARKDKREYEKNNEKRSIFRSSLSEQLRADEQMEKVRESDLRRLEAIQRQNGQCLYCGRTITFRTCEMDHIVPRKGVGSTNTRTNFAAVCAECNRMKSNTPFAIWARSEDAQTRGVSLAEAKKRVTMFTFNPKSYAPREVKAFKQAVIARLQQTEDDAAIDNRSIESVAWMADELHRRIDWYFNAKQYVNSASIDDAEAETMKTTVSVFQGRVTASARRAAGIEGKIHFIGQQSKTRLDRRHHAVDASVIAMMNTAAAQTLMERESLRESQRLIGLMPGERSWKEYPYEGTSRYESFHLWLDNMDVLLELLNDALDNDRIAVMQSQRYVLGNSIAHDATIHPLEKVPLGSAMSADLIRRASTPALWCALTRLPDYDEKEGLPEDSHREIRVHDTRYSADDEMGFFASQAAQIAVQEGSADIGSAIHHARVYRCWKTNAKGVRKYFYGMIRVFQTDLLRACHDDLFTVPLPPQSISMRYGEPRVVQALQSGNAQYLGSLVVGDEIEMDFPVSMLMVRLASIYNSSRSLVEGTLHGNIGLLMDSLTRRS

SEQ ID NO: 846 - protein, 166 aa, Bifidobacterium longum
MGLAAVEVSDENSPVRLLNAQSVIHDGGVDPQKNKEAITRKNMSGVARRTRRMRRRKRERLHKLDMLLGKFGYPVIEPESLDKPFEEWHVRAELATRYIEDDELRRESISIALRHMARHRGWRNPYRQVDSLISDNPYSKQYGELKEKAKAYNDDATAAEEESTPA

SEQ ID NO: 847 - protein, 1138 aa, Bifidobacterium longum
MNSVGLAAVEVSDENSPVRLLNAQSVIHDGGVDPQKNKEAITRKNMSGVARRTRRMRRRKRERLHKLDMLLGKFGYPVIEPESLDKPFEEWHVRAELATRYIEDDELRRESISIALRHMARHRGWRNPYRQVDSLISDNPYSKQYGELKEKAKAYNDDATAAEEESTPAQLVVAMLDAGYAEAPRLRWRTGSKKPDAEGYLPVRLMQEDNANELKQIFRVQRVPADEWKPLFRSVFYAVSPKGSAEQRVGQDPLAPEQARALKASLAFQEYRIANVITNLRIKDASAELRKLTVDEKQSIYDQLVSPSSEDITWSDLCDFLGFKRSQLKGVGSLTEDGEERISSRPPRLTSVQRIYESDNKIRKPLVAWWKSASDNEHEAMIRLLSNTVDIDKVREDVAYASAIEFIDGLDDDALTKLDSVDLPSGRAAYSVETLQKLTRQMLTTDDDLHEARKTLFNVTDSWRPPADPIGEPLGNPSVDRVLKNVNRYLMNCQQRWGNPVSVNIEHVRSSFSSVAFARKDKREYEKNNEKRSIFRSSLSEQLRADEQMEKVRESDLRRLEAIQRQNGQCLYCGRTITFRTCEMDHIVPRKGVGSTNTRTNFAAVCAECNRMKSNTPFAIWARSEDAQTRGVSLAEAKKRVTMFTFNPKSYAPREVKAFKQAVIARLQQTEDDAAIDNRSIESVAWMADELHRRIDWYFNAKQYVNSASIDDAEAETMKTTVSVFQGRVTASARRAAGIEGKIHFIGQQSKTRLDRRHHAVDASVIAMMNTAAAQTLMERESLRESQRLIGLMPGERSWKEYPYEGTSRYESFHLWLDNMDVLLELLNDALDNDRIAVMQSQRYVLGNSIAHDATIHPLEKVPLGSAMSADLIRRASTPALWCALTRLPDYDEKEGLPEDSHREIRVHDTRYSADDEMGFFASQAAQIAVQEGSADIGSAIHHARVYRCWKTNAKGVRKYFYGMIRVFQTDLLRACHDDLFTVPLPPQSISMRYGEPRVVQALQSGNAQYLGSLVVGDEIEMDFSSLDVDGQIGEYLQFFSQFSGGNLAWKHWVVDGFFNQTQLRIRPRYLAAEGLAKAFSDDVVPDGVQKIVTKQGWLPPVNTASKTAVRIVRRNAFGEPRLSSAHHMPCSWQWRHE

SEQ ID NO: 848 - protein, 182 aa, Bifidobacterium longum
MRGKRYRIGIDVGLNSVGLAAVEVSDENSPVRLLNAQSVIHDGGVDPQKNKEAITRKNMSGVARRTRRMRRRKRERLHKLDMLLGKFGYPVIEPESLDKPFEEWHVRAELATRYIEDDELRRESISIALRHMARHRGWRNPYRQVDSLISDNPYSKQYGELKEKAKAYNDDATAAEEESTPA

SEQ ID NO: 849 - protein, 441 aa, Bifidobacterium longum
MVAMLDAGYAEAPRLRWRTGSKKPDAEGYLPVRLMQEDNANELKQIFRVQRVPADEWKPLFRSVFYAVSPKGSAEQRVGQDPLAPEQARALKASLAFQEYRIANVITNLRIKDASAELRKLTVDEKQSIYDQLVSPSSEDITWSDLCDFLGFKRSQLKGVGSLTEDGEERISSRPPRLTSVQRIYESDNKIRKPLVAWWKSASDNEHEAMIRLLSNTVDIDKVREDVAYASAIEFIDGLDDDALTKLDSVDLPSGRAAYSVETLQKLTRQMLTTDDDLHEARKTLFNVTDSWRPPADPIGEPLGNPSVDRVLKNVNRYLMNCQQRWGNPVSVNIEHVRSSFSSVAFARKDKREYEKNNEKRSIFRSSLSEQLRADEQMEKVRESDLRRLEAIQRQNGQCLYCGRTITFRTCEMDHIVPRKGVGSTNTRTNFAAVCAECNRM

SEQ ID NO: 850 - protein, 967 aa, Bifidobacterium longum
MVAMLDAGYAEAPRLRWRTGSKKPDAEGYLPVRLMQEDNANELKQIFRVQRVPADEWKPLFRSVFYAVSPKGSAEQRVGQDPLAPEQARALKASLAFQEYRIANVITNLRIKDASAELRKLTVDEKQSIYDQLVSPSSEDITWSDLCDFLGFKRSQLKGVGSLTEDGEERISSRPPRLTSVQRIYESDNKIRKPLVAWWKSASDNEHEAMIRLLSNTVDIDKVREDVAYASAIEFIDGLDDDALTKLDSVDLPSGRAAYSVETLQKLTRQMLTTDDDLHEARKTLFNVTDSWRPPADPIGEPLGNPSVDRVLKNVNRYLMNCQQRWGNPVSVNIEHVRSSFSSVAFARKDKREYEKNNEKRSIFRSSLSEQLRADEQMEKVRESDLRRLEAIQRQNGQCLYCGRTITFRTCEMDHIVPRKGVGSTNTRTNFAAVCAECNRMKSNTPFAIWARSEDAQTRGVSLAEAKKRVTMFTFNPKSYAPREVKAFKQAVIARLQQTEDDAAIDNRSIESVAWMADELHRRIDWYFNAKQYVNSASIDDAEAETMKTTVSVFQGRVTASARRAAGIEGKIHFIGQQSKTRLDRRHHAVDASVIAMMNTAAAQTLMERESLRESQRLIGLMPGERSWKEYPYEGTSRYESFHLWLDNMDVLLELLNDALDNDRIAVMQSQRYVLGNSIAHDATIHPLEKVPLGSAMSADLIRRASTPALWCALTRLPDYDEKEGLPEDSHREIRVHDTRYSADDEMGFFASQAAQIAVQEGSADIGSAIHHARVYRCWKTNAKGVRKYFYGMIRVFQTDLLRACHDDLFTVPLPPQSISMRYGEPRVVQALQSGNAQYLGSLVVGDEIEMDFSSLDVDGQIGEYLQFFSQFSGGNLAWKHWVVDGFFNQTQLRIRPRYLAAEGLAKAFSDDVVPDGVQKIVTKQGWLPPVNTASKTAVRIVRRNAFGEPRLSSAHHMPCSWQWRHE

SEQ ID NO: 851 - protein, 1151 aa, Bifidobacterium sp.
MRGKRYRIGIDVGLNSVGLAAVEVSDENSPVRLLNAQSVIHDGGVDPQKNKEAITRKNMSGVARRTRRMRRRKRERLHKLDMLLGKFGYPVIEPESLDKPFEEWHVRAELATRYIEDDELRRESISIALRHMARHRGWRNPYRQVDSLISDNPYSKQYGELKEKAKAYNDDATAAEEESTPAQLVVAMLDAGYAEAPRLRWRTGSKKPDAEGYLPVRLMQEDNANELKQIFRVQRVPADEWKPLFRSVFYAVSPKGSAEQRVGQDPLAPEQARALKASLAFQEYRIANVITNLRIKDASAELRKLTVDEKQSIYDQLVSPSSEDITWSDLCDFLGFKRSQLKGVGSLTEDGEERISSRPPRLTSVQRIYESDNKIRKPLVAWWKSASDNEHEAMIRLLSNTVDIDKVREDVAYASAIEFIDGLDDDALTKLDSVDLPSGRAAYSVETLQKLTRQMLTTDDDLHEARKTLFNVTDSWRPPADPIGEPLGNPSVDRVLKNVNRYLMNCQQRWGNPVSVNIEHVRSSFSSVAFARKDKREYEKNNEKRSIFRSSLSEQLRADEQMEKVRESDLRRLEAIQRQNGQCLYCGRTITFRTCEMDHIVPRKGVGSTNTRTNFAAVCAECNRMKSNTPFAIWARSEDAQTRGVSLAEAKKRVTMFTFNPKSYAPREVKAFKQAVIARLQQTEDDAAIDNRSIESVAWMADELHRRIDWYFNAKQYVNSASIDDAEAETMKTTVSVFQGRVTASARRAAGIEGKIHFIGQQSKTRLDRRHHAVDASVIAMMNTAAAQTLMERESLRESQRLIGLMPGERSWKEYPYEGTSRYESFHLWLDNMDVLLELLNDALDNDRIAVMQSQRYVLGNSIAHDATIHPLEKVPLGSAMSADLIRRASTPALWCALTRLPDYDEKEGLPEDSHREIRVHDTRYSADDEMGFFASQAAQIAVQEGSADIGSAIHHARVYRCWKTNAKGVRKYFYGMIRVFQTDLLRACHDDLFTVPLPPQSISMRYGEPRVVQALQSGNAQYLGSLVVGDEIEMDFSSLDVDGQIGEYLQFFSQFSGGNLAWKHWVVDGFFNQTQLRIRPRYLAAEGLAKAFSDDVVPDGVQKIVTKQGWLPPVNTASKTAVRIVRRNAFGEPRLSSAHHMPCSWQWRHE

SEQ ID NO: 852 - protein, 1092 aa, BreviBacillus laterosporus
MAYTMGIDVGIASCGWAIVDLERQRIIDIGVRTFEKAENPKNGEALAVPRREARSSRRRLRRKKHRIERLKYMFVRNGLAVDIQHLEQTLRSQNEIDVWQLRVDGLDRMLTQKEWLRVLIHLAQRRGFQSNRKTDGSSEDGQVLVNVTENDRLMEEKDYRTVAEMMVKDEKFSDHKRNKNGNYHGVVSRASLLVEIHTLFESQRQHHNFLASKDFELEYINIWSSQRPVATKDQIEKMIGTCTFLPKEKRAPKASWHFQYFMLLQTINHIRITNAQGTRPLNKEEIEQVVNMALTKSKVSYHDIRKVLDLSEEYQFVGLDYGKEDEKKKVESKETIIKLDDYHKLNKIFNEVELAKGETWEAVDYDTVAYALTFFKDDEDIRDYLQNKYKDSKNRLVKNVANKEYTNELIEKVSTLSFRKVGHLSLKALRKIIPFLEQGMTYDKACQAAGFNFQGISKKKRSVVLPVIDQISNPVVNRALTQTRKVINALIKKYGSPETIHIETARELSKRFDERKNITKDYKENRDKNERAKKHLSELGIINPTGLDIVKYKLWCEQQGRCMYSNQPISFERLRESGYTEVDHIIPYSRSMNDSYNNRVLVMTRENREKSNQTPYEYMGNDTQRWDEFEQRVTTNPQIKKEKRQNLLLKGFTNRRELEMLERNLNDTRHITKYLSHFISTNLEFSPSDKKKKVVNTSGRITSHLRSRWGLEKNREQNDLHHAMDAVVIAVTSDSFIQQVTNYYKRKERRELNGDDKFPLPWKFFREEVIARLSPNPKEQIEALPNHFYSEDELADLQPIFVSRMPKRSITGEAHQAQFRRVVGKTKEGKNITAKKTALVDISYDKNGDFNMYGRETDPATYEAIKERYLEFGGNAKKAFSTDLHKPKKDGTKGPLIKSVRIMENKTLVHPVNKGKGVVYNSSIVRTDVFQRKEKYYLLPVYVTDVTKGKLPNKVIAAKKGYDDWIEVDDSFTFLYSLYPNDLIFIRQNPKKKISLKKRIESHSISDSKEVQEILTYYKGVDSSTAAIEFITHDGSYYAKGVGVQNLDCFEKYQVDILGNYSKVKGEKRLELETSDNNHKGKDVNSIKSTSR

SEQ ID NO: 853 - protein, 103 aa, Butyrivibrio fibrisolvens
MISVGQSRKDLEDLGYEFKLSFYKEDIIEYEKNGDILVERFLSRTMPQVRNYIETKPIDRPKYDKRNPVGLSKTSSIRKITMDILGNRFYVDKMSFNNVVGTQ

SEQ ID NO: 854 - protein, 177 aa, Butyrivibrio fibrisolvens
MLIAFSQMGYDAYHELTNKYIDFETGEIIDKEGFNELLNNDLVYKNTMYESKWLKIKGNIEKAAEKNKYWYQVNKKCNRGLCNQTVYGTRESDGDVYKISKIDIRTDDGFKKFKNIVDKGNESVFLMYENDPKTFELIMDIYKNYSDSKNPFVQYEKETGDIIRKYSKKITGQRFLN

SEQ ID NO: 855 - protein, 1442 aa, Caenispirillum salinarum
MPVLSPLSPNAAQGRRRWSLALDIGEGSIGWAVAEVDAEGRVLQLTGTGVTLFPSAWSNENGTYVAHGAADRAVRGQQQRHDSRRRRLAGLARLCAPVLERSPEDLKDLTRTPPKADPRAIFFLRADAARRPLDGPELFRVLHHMAAHRGIRLAELQEVDPPPESDADDAAPAATEDEDGTRRAAADERAFRRLMAEHMHRHGTQPTCGEIMAGRLRETPAGAQPVTRARDGLRVGGGVAVPTRALIEQEFDAIRAIQAPRHPDLPWDSLRRLVLDQAPIAVPPATPCLFLEELRRRGETFQGRTITREAIDRGLTVDPLIQALRIRETVGNLRLHERITEPDGRQRYVPRAMPELGLSHGELTAPERDTLVRALMHDPDGLAAKDGRIPYTRLRKLIGYDNSPVCFAQERDTSGGGITVNPTDPLMARWIDGWVDLPLKARSLYVRDVVARGADSAALARLLAEGAHGVPPVAAAAVPAATAAILESDIMQPGRYSVCPWAAEAILDAWANAPTEGFYDVTRGLFGFAPGEIVLEDLRRARGALLAHLPRTMAAARTPNRAAQQRGPLPAYESVIPSQLITSLRRAHKGRAADWSAADPEERNPFLRTWTGNAATDHILNQVRKTANEVITKYGNRRGWDPLPSRITVELAREAKHGVIRRNEIAKENRENEGRRKKESAALDTFCQDNTVSWQAGGLPKERAALRLRLAQRQEFFCPYCAERPKLRATDLFSPAETEIDHVIERRMGGDGPDNLVLAHKDCNNAKGKKTPHEHAGDLLDSPALAALWQGWRKENADRLKGKGHKARTPREDKDFMDRVGWRFEEDARAKAEENQERRGRRMLHDTARATRLARLYLAAAVMPEDPAEIGAPPVETPPSPEDPTGYTAIYRTISRVQPVNGSVTHMLRQRLLQRDKNRDYQTHHAEDACLLLLAGPAVVQAFNTEAAQHGADAPDDRPVDLMPTSDAYHQQRRARALGRVPLATVDAALADIVMPESDRQDPETGRVHWRLTRAGRGLKRRIDDLTRNCVILSRPRRPSETGTPGALHNATHYGRREITVDGRTDTVVTQRMNARDLVALLDNAKIVPAARLDAAAPGDTILKEICTEIADRHDRVVDPEGTHARRWISARLAALVPAHAEAVARDIAELADLDALADADRTPEQEARRSALRQSPYLGRAISAKKADGRARAREQEILTRALLDPHWGPRGLRHLIMREARAPSLVRIRANKTDAFGRPVPDAAVWVKTDGNAVSQLWRLTSVVTDDGRRIPLPKPIEKRIEISNLEYARLNGLDEGAGVTGNNAPPRPLRQDIDRLTPLWRDHGTAPGGYLGTAVGELEDKARSALRGKAMRQTLTDAGITAEAGWRLDSEGAVCDLEVAKGDTVKKDGKTYKVGVITQGIFGMPVDAAGSAPRTPEDCEKFEEQYGIKPWKAKGIPLA

SEQ ID NO: 856 - protein, 984 aa, Campylobacter coli
MARILAFDIGISSIGWAFSENDELKDCGVRIFTKAENPKTGESLALPRRLARSARKCLARRKARLNHLKHLIANEFKLNYEDYQSFDESLAKAYKGSLISPYELRFRALNELLSKQDFARVILHIAKRRGYDDIKNNGDEEKSEILKAIKQNEEKLVNYQSVGEYLYKEYFQKFKENSKEFINVRNKKESYERCIAQSFLKDELKLIFQKQREFGFSFSKKFEEEVLSVAFYKRALKDFSHLVGNCSFFTDEKRAPKNSPLAFMFVALTRIINLLNNLKNTEGILYTKDDLNALLNEVLKNGTLTYKQTKKLLGLSDDYEFKGEKGTYFIEFKKYKEFIKALGEHNLSQDDLNEIAKDITLIKDEIKLKKALAKYDLNQNQIDSLSKLEFKDHLNISFKALKLITPLMLEGKKYDEACNELNLKVAINEDKKDFLPAFNETYYKDEVTNPVVLRAIKEYRKVLNALLKKYGKVHKINIELAREVGKNHSQRAKIEKEQNENYKAKKDAELECEKLGLKINSKNILKLRLFKEQKEFCAYSGEKIKISDLQDEKMLEIDHIYPYSRSFDDSYMNKVLVFTKQNQEKLNQTPFEAFGNDSAKWQKIEVLAKNLPTKKQKRILDKNYKDKEQKNFKDRNLNDTRYIARLVLNYTKDYLDFLPLSDDENTKLNDTQKGSKVHVEAKSGMLTSALRHTWGFSAKDRNNHLHHAIDAVIIAYANNSIVKAFSDFKKEQESNSAELYAKKISELDYKNKRKFFEPFSGFRQKVLDKIDEIFVSKPERKKPSGALHEETFRKEEEFYQSYGGKEGVLKALELGKIRKVNGKIVKNGDMFRVDIFKHKKTNKFYAVPIYTMDFALKVLPNKAVARSKKGEIKDWILMDENYEFCFSLYKDSLILIQTKDMQEPEFVYYNAFTSSTVSLIVSKHDNKFETLSKNQKILFKNANEKEVIAKSIGIQNLKVFEKYIVSALGEVTKAEFRQREDFKK

SEQ ID NO: 857 - protein, 984 aa, Campylobacter coli
MARILAFDIGISSIGWAFSENDELKDCGVRIFTKAENPKTGESLALPRRLARSARKRLARRKARLNHLKHLIANEFKLNYEDYQSFDESLAKAYKGSLISPYELRFRALNELLSKQDFARVILHIAKRRGYDDIKNNGDEEKGKILKAIKQNEEKLVNYQSVGEYLYKEYFQKFKENSKEFINVRNKKESYERCITQSFLKYELKLIFQKQREFGFSFSKKFEEEVLSVAFYKRALKDFSHLVGNCSFFSDEKRAPKNSPLAFMFVALTRIINLLNNLKNTEGILYTKDDLNALLNEVLKNGTLTYKQTKKLLGLSDDYEFKGEKGTYFIEFKKYKEFIKALGEHNLSQDDLNEIAKDITLIKDEIKLKKALAKYDLNQNQIDSLSKLEFKDHLNISFKALKLITPLMLEGKKYDEACNELNLKVAINEDKKDFLPAFNETYYKDEVTNPVVLRAIKEYRKVLNALLKKYGKVHKINIELAREVGKNYSQRAKIEKEQNENYKAKKDAELECEKLGLKINSKNILKLRLFKEQKEFCAYSGEKIKISDLQDEKMLEIDHIYPYSRSFDDSYMNKVLVFTKQNQEKLNQTPFEAFGNDSAKWQKIEVLAKNLPTKKQKRILDKNYKDKEQKNFKDRNLNDTRYIARLVLNYTKDYLDFLPLSDDENTKLNDTQKGSKVHVEAKSGMLTSALRHTWGFSAKDRNNHLHHAIDAVIIAYANNSIVKAFSDFKKEQESNSAELYAKKISELDYKNKRKFFEPFSGFRQKVLDKIDEIFVSKPERKKPSGALHEETFRKEEEFYQSYGGKEGVLKALELGKIRKVNGKIVKNGDMFRVDIFKHKKTNKFYAVPIYTMDFALKVLPNKAVARSKKGEIKDWILMDENYEFCFSLYKDSLILIQTKDMQEPEFVYYNAFTSSTVSLIVSKHDNKFETLSKNQKILFKNANEKEVIAKSIGIQNLKVFEKYIVSALGEVTKAEFRQREDFKK

SEQ ID NO: 858 - protein, 984 aa, Campylobacter coli
MARILAFDIGISSIGWAFSENDELKDCGVRIFTKAENPKTGESLALPRRLARSARKRLARRKARLNHLKHLIANEFKLNYEDYQSFDESLAKAYKGSLISPYELRFRALNELLSKQDFARVILHIAKRRGYDDIKNNGDEEKSEILKAIKQNEEKLVNYQSVGEYLYKEYFQKFKENSKEFINVRNKKESYERCIAQSFLKDELKLIFQKQREFGFSFSKKFEEEVLSVAFYKRALKDFSHLVGNCSFFTDEKRAPKNSPLAFMFVALTRIINLLNNLKNTEGILYTKDDLNTLLNEVLKNGTLTYKQTKKLLGLSDDYEFKGEKGTYFIEFKKYKEFIKALGEHNLSQDNLNEIAKDITLIKDEIKLKKALAKYDLNQNQIDSLSKLEFKDHLNISFKALKLITPLMLEGKKYDEAYNELNLKVAINEDKKDFLPAFNETYYKDEVTNPVVLRAIKEYRKVLNALLKKYGKVHKINIELAREVGKNHSQRAKIEKEQNENYKAKKDAELECEKLGLKINSKNILKLRLFKEQKEFCAYSGEKIKISDLQDEKMLEIDHIYPYSRSFDDSYMNKVLVFTKQNQEKLNQTPFEAFGNDSAKWQKIEVLAKNLPTKKQKRILDKNYKDKEQKDFKDRNLNDTRYIARLVLNYTKDYLDFLPLSDDENTKLNDTQKGSKVHVEAKSGMLTSALRHTWGFSAKDRNNHLHHAIDAVIIAYANNSIVKAFSDFKKEQESNSAELYAKKISELDYKNKRKFFEPFSGFRQKVLDKIDEIFVSKPERKKPSGALHEETFRKEEEFYQSYGGKEGVLKALELGKIRKVNGKIVKNGDMFRVDIFKHKKTNKFYAVPIYTMDFALKVLPNKAVARSKKGEIKDWILMDENYEFCFSLYKDSLILIQTKDMQEPELVYFNAFTSSTVSLIVSKHDNKFETLSKNQKILFKNANEKEVIAKSIGIQNLKVFEKYIVSALGEVTKAEFRQREDFKK

SEQ ID NO: 859 - protein, 984 aa, Campylobacter coli
MARILAFDIGISSIGWAFSENDELKDCGVRIFTKAENPKTGESLALPRRLARSARKRLARRKARLNHLKHLIANEFKLNYEDYQSFDESLAKAYKGSLISPYELRFRALNELLSKQDFARVILHIAKRRGYDDIKNNGDEEKSEILKAIKQNEEKLVNYQSVGEYLYKEYFQKFKENSKEFINVRNKKESYERCIAQSFLKDELKLIFQKQREFGFSFSKKFEEEVLSVAFYKRALKDFSHLVGNCSFFTDEKRAPKNSPLAFMFVALTRIINLLNNLKNTEGILYTKDDLNALLNEVLKNGTLTYKQTKKLLGLSDDYEFKGEKGTYFIEFKKYKEFIKALGEHNLSQDDLNEIAKDITLIKDEIKLKKALAKYDLNQNQIDSLSKLEFKDHLNISFKALKLITPLMLEGKKYDEACNELNLKVAINEDKKDFLPAFNETYYKDEVTNPVVLRAIKEYRKVLNALLKKYGKVHKINIELAREVGKNYSQRAKIEKEQNENYKAKKDAELECEKLGLKINSKNILKLRLFKEQKEFCAYSGEKIKISDLQDEKMLEIDHIYPYSRSFDDSYMNKVLVFTKQNQEKLNQTPFEAFGNDSAKWQKIEVLAKNLPTKKQKRILDKNYKDKEQKNFKDRNLNDTRYIARLVLNYTKDYLDFLPLSDDENTKLNDTQKGSKVHVEAKSGMLTSALRHTWGFSAKDRNNHLHHAIDAVIIAYANNSIVKAFSDFKKEQESNSAELYAKKISELDYKNKRKFFEPFSGFRQKVLDKIDEIFVSKPERKKPSGALHEETFRKEEEFYQSYGGKEGVLKALELGKIRKVNGKIVKNGDMFRVDIFKHKKTNKFYAVPIYTMDFALKVLPNKAVARSKKGEIKDWILMDENYEFCFSLYKDSLILIQTKDMQEPEFVYYNAFTSSTVSLIVSKHDNKFETLSKNQKILFKNANEKEVIAKSIGIQNLKVFEKYIVSALGEVTKAEFRQREDFKK

SEQ ID NO: 860 - protein, 987 aa, Campylobacter coli
MARILAFDIGISSIGWAFSENDELKDCGVRIFTKAENPKTGESLALPRRLARSARKRLARRKARLNHLKHLIANEFKLNYEDYQSFDESLAKAYKGSLISPYELRFRALNELLSKQDFARVILHIAKRRGYDDIKNNGDEEKSEILKAIKQNEEKLVNYQSVGEYLYKEYFQKFKENSKEFINVRNKKESYERCIAQSFLKDELKLIFQKQREFGFSFSKKFEEEVLSVAFYKRALKDFSHLVGNCSFFTDEKRAPKNSPLAFMFVALTRIINLLNNLKNTEGILYTKDDLNTLLNEVLKNGTLTYKQTKKLLGLSDDYEFKGEKGTYFIEFKKYKEFIKALGEHNLSQDNLNEIAKDITLIKDEIKLKKALAKYDLNQNQIDSLSKLEFKDHLNISFKALKLITPLMLEGKKYDEAYNELNLKVAINEDKKDFLPAFNETYYKDEVTNPVVLRAIKEYRKVLNALLKKYGKVHKINIELAREVGKNHSQRAKIEKEQNENYKAKKDAELECEKLGLKINSKNILKLRLFKEQKEFCAYSGEKIKISDLQDEKMLEIDHIYPYSRSFDDSYMNKVLVFTKQNQEKLNQTPFEAFGNDSAKWQKIEVLAKNLPTKKQKRILDKNYKDKEQKDFKDRNLNDTRYIARLVLNYTKDYLDFLPLSDDENTKLNDTQKGSKVHVEAKSGMLTSALRHTWGFSAKDRNNHLHHAIDAVIIAYANNSIVKAFSDFKKEQESNSAELYAKKISELDYKNKRKFFEPFSGFRQKVLDKIDEIFVSKPERKKPSGALHEETFRKEEEFYQSYGGKEGVLKALELGKIRKVNGKIVKNGDMFRVDIFKHKKTNKFYAVPIYTMDFALKVLPNKAVARSKKGEIKDWILMDENYEFCFSLYKDSLILIQTKDMQEPELVYFNAFTSSTVSLIVSKHDNKFETLSKNQKILFKNANEKEVIAKSIGIQNLKVFEKYIVSALGEVTKAEFRQREDFKNELR

SEQ ID NO: 861 - protein, 984 aa, Campylobacter coli
MARILAFDIGISSIGWAFSENDELKDCGVRIFTKAENPKTGESLALPRRLARSARKRLARRKARLNHLKHLIANEFKLNYEDYQSFDESLAKAYKGSLISPYELRFRALNELLSKQDFARVILHIAKRRGYDDIKNNGDEEKSEILKAIKQNEEKLVNYQSVGEYLYKEYFQKFKENSKEFINVRNKKESYERCIAQSFLKDELKLIFQKQREFGFSFSKKFEEEVLSVAFYKRALKDFSHLVGNCSFFTDEKRAPKNSPLAFMFVALTRIINLLNNLKNTEGILYTKDDLNTLLNEVLKNGTLTYKQTKKLLGLSDDYEFKGEKGTYFIEFKKYKEFIKALGEHNLSQDNLNEIAKDITLIKDEIKLKKALAKYDLNQNQIDSLSKLEFKDHLNISFKALKLITPLMLEGKKYDEAYNELNLKVAINEDKKDFLPAFNETYYKDEVTNPVVLRAIKEYRKVLNALLKKYGKVHKINIELAREVGKNHSQRAKIEKEQNENYKAKKDAELECEKLGLKINSKNILKLRLFKEQKEFCAYSGEKIKISDLQDEKMLEIDHIYPYSRSFDDSYMNKVLVFTKQNQEKLNQTPFEAFGNDSAKWQKIEVLAKNLPTKKQKRILDKNYKDKEQKDFKDRNLNDTRYIARLVLNYTKDYLDFLPLSNDENTKLNDTQKGSKVHVEAKSGMLTSALRHTWGFSAKDRNNHLHHAIDAVIIAYANNSIVKAFSDFKKEQESNSAELYAKKISELDYKNKRKFFEPFSGFRQKVLDKIDEIFVSKPERKKPSGALHEETFRKEEEFYQSYGGKEGVLKALELGKIRKVNGKIVKNGDMFRVDIFKHKKTNKFYAVPIYTMDFALKVLPNKAVARSKKGEIKDWILMDENYEFCFSLYKDSLILIQTKDMQEPELVYFNAFTSSTVSLIVSKHDNKFETLSKNQKILFKNANEKEVIAKSIGIQNLKVFEKYIVSALGEVTKAEFRQREDFKK

SEQ ID NO: 862 - protein, 987 aa, Campylobacter coli
MARILAFDIGISSIGWAFSENDELKDCGVRIFTKAENPKTGESLALPRRLARSARKRLARRKARLNHLKHLIANEFKLNYEDYQSFDESLAKAYKGSLISPYELRFRALNELLSKQDFARVILHIAKRRGYDDIKNSDDKEKGAILKAIKQNEEKLANYQSVGEYLYKEYFQKFKENSKEFTNVRNKKESYERCIAQSFLKDELKLIFKKQREFGFSFSKKFEEEVLSVAFYKRALKDFSHLVGNCSFFTDEKRAPKNSPLAFMFVALTRIINLLNNLKNTEGILYTKDDLNALLNEVLKNGTLTYKQTKKLLGLSDDYEFKGEKGTYFIEFKKYKEFIKALGDHSLSQDDLNEIAKDITLIKDEIKLKKALAKYDLNQNQIDSLSKLEFKDHLNISFKALKLITPLMLEGKKYDEACNELNLKVAINEDKKDFLPAFNETYYKDEVTNPVVLRAIKEYRKVLNALLKKYGKVHKINIELAREVGKNYSQRAKIEKEQNENYKAKKDAELECEKLGLKINSKNILKLRLFKEQKEFCAYSGEKIKISDLQDEKMLEIDHIYPYSRSFDDSYMNKVLVFTKQNQEKLNKTPFEAFGNDSTKWQKIEVLAKNLPEKKQKRILDKNYKDKEQKDFKDRNLNDTRYIARLVLNYTKDYLDFLPLSDDENTKLNDTQKGSKVHVEAKSGMLTSALRHTWGFSTKDRNNHLHHAIDAVIIAYANNSIVKAFSDFKKEQESNSAELYAKKISELDYKNKRKFFEPFSGFRQKVLDKIDEIFVSKPERKKPSGALHEETFRKEEEFYQSYGGKEGVLKALELGKIRKVNGKIVKNGDMFRVDIFKHKKTNKFYAVPIYTMDFALKVLPNKAVARSKKGEIKDWILMDENYEFCFSLYKDSLILIQTKDMQEPEFVYYNAFTSSTVSLIVSKHDNKFETLSKNQKILFKNANEKEVIAKSIGIQNLKVFEKYIVSALGEVTKAEFRQREDFKNELR

SEQ ID NO: 863 - protein, 984 aa, Campylobacter coli
MARILAFDIGISSIGWAFSENDELKDCGVRIFTKAENPKTGESLALPRRLARSARKRLARRKARLNHLKHLIANEFKLNYEDYQSFDESLAKAYKGSLISPYELRFRALNELLSKQDFARVILHIAKRRGYDDIKNSDDKEKGAILKAIKQNEEKLTNYQSVGEYLYKEYFQKFKENSKEFTNVRNKKESYERCIAQSFLKDELKLIFKKQREFGFSFSKKFEEEVLSVAFYKRALKDFSHLVGNCSFFTDEKRAPKNSPLAFMFVALTRIINLLNNLKNTEGILYTKDDLNALLNEVLKNGTLTYKQTKKLLGLSDDYEFKGEKGTYFIEFKKYKEFIKALGDHSLSQDDLNEIAKDITLIKDEIKLKKALAKYDLNQNQIDSLSKLEFKDHLNISFKALKLITPLMLEGKKYDEACNELNLKVAINEDKKDFLPAFNETYYKDEVTNPVVLRAIKEYRKVLNALLKKYGKVHKINIELAREVGKNYSQRAKIEKEQNENYKAKKDAELECEKLGLKINSKNILKLRLFKEQKEFCAYSGEKIKISDLQDEKMLEIDHIYPYSRSFDDSYMNKVLVFTKQNQEKLNQTPFEAFGNDSAKWQKIEVLAKNLPTKKQKRILDKNYKDKEQKDFKDRNLNDTRYIARLVLNYTKDYLDFLPLSDDENTKLNDTQKGSKVHVEAKSGMLTSALRHTWGFSAKDRNNHLHHAIDAVIIAYANNSIVKAFSDFKKEQESNSAELYAKKISELDYKNKRKFFEPFSGFRQKVLDKIDEIFVSKPERKKPSGALHEETFRKEEEFYQSYGGKEGVLKALELGKIRKVNGKIVKNGDMFRVDIFKHKKTNKFYAVPIYTMDFALKVLPNKAVARSKKGEIKDWILMDENYEFCFSLYKDSLILIQTKDMQEPEFVYYNAFTSSTVSLIVSKHDNKFETLSKNQKILFKNANEKEVIAKSIGIQNLKVFEKYIVSALGEVTKAEFRQREDFKK

SEQ ID NO: 864 - protein, 965 aa, Campylobacter coli
MKIIGFNLGIANIGWALRENDEIIDCGVRVFDIPENPKNGNSLALERRENKARMKIVKRKKARMLATKTFLKKELNVDLSKLFLIGSTQSIYELRTKALSSLISKEELSAIILHIAKHRGYDDSALKNENGTIIEALNKNKEAMLKFKSVGEYFYKNFVQNKEVKKIRNTTEDYSNSVPRSLLKQELDLILDKQKELGLIKNADFKAKLFEIIFFKRPLKDFSNKIGNCIFFENEKRAAKNTISACEFVALGKVVNLLKSIEKDIGIVYEKDSINEIMSIILDKTSISYKKIRDILNLPQDINFKGLDYSKNNVENSKLVDLKKLNEFKKALGDGFTNLDKDILDSIATDITLTKDTATLKEKLKNYNVLNAEQIEKLSELVFNDHINLSLKALKQIIPLMYEGKRYDEACELCNFTIAKNQEKNEYLPLFEKTRFAKDISSPVVIRAICEFRKLLNDIIRRYGSVHKIHLELTRDFGISFNDRKKIIKEIEQNEQSRIKALETIKELKLEETSKNIQIVRLFEDQKGICPYSGLKMDLKCLDELVIDYIRPYNRSLDDSYSNKVLTFKKLNDLKQGKTPFEAFGEDEKLWAEINERIKEYNGKKRFKIFDKFFKDKKPFDFTEQTLQDTRWLTKLVASYLNEYLSFLPISEDENTALGYGEKGSKQHVILSSGMITQMLRNFWYLGFKNHKDYKNNAMDAIIVAFTTNSIIFTFNNFKKELDLAKAEFYANKISESDYLLKRKFLPPFSGFKEQALEKVKNIFVSHSLKIKNKGTLHELTPLKIKELKNTYGDLDLAVKLGKIRKYNDKYYANAKGSLVRTDLFADKENKFHAVSIYKADFSTKKLPNKTPATTSNGETKEGIEMNENYNFCMSLYKNTPISVKIKGMKEPIICYYHGFNTSGSKITYKKHDNNYHNLSEDEMVVFRKNDKESIVVGKILEIKKYSISPSGELSLIENEERKWF

SEQ ID NO: 865 - protein, 965 aa, Campylobacter coli
MKIIGFNLGIANIGWALRENDEIIDCGVRVFDIPENPKNGNSLALERRENKARMKIVKRKKARMLATKTFLKKELNVDLSKLFLIGSTQSIYELRTKALSSLISKEELSAIILHIAKHRGYDDSALKNENGTIIEALNKNKEAMLKFKSVGEYFYKNFVQNKEVKKIRNTTEDYSNSVPRSLLKQELDLILDKQKELGLIKNADFKAKLFEIIFFKRPLKDFSNKIGNCIFFENEKRAAKNTISACEFVALGKVVNLLKSIEKDIGIVYEKDSINEIMSIILDKTSISYKKIRDILNLPQDINFKGLDYSKNNAENSKLVDLKKLNEFKKALGDGFANLDKDILDSIATDITLTKDTATLKEKLKNYNVLNAEQIEKLSELVFNDHINLSLKALKQIIPLMYEGKRYDEACELCNFTIAKNQEKNEYLPLFEKTRFAKDISSPVVIRAICEFRKLLNDIIRRYGSVHKIHLELTRDFGISFNDRKKIIKEIEQNEQSRIKALETIKELKLEETSKNIQIVRLFEDQKGICPYSGLKMDLKCLDELVIDYIRPYNRSLDDSYSNKVLTFKKLNDLKQGKTPFEAFGEDEKLWAEINERIKEYNGKKRFKIFDKFFKDKKPFDFTEQTLQDTRWLTKLVASYLNEYLSFLPISEDENTALGYGEKGSKQHVVLSSGMITQMLRNFWYLGFKNHKNYKNNAMDAIIVAFTTNSIIFAFNNFKKELDLAKAEFYANKISESDYLLKRKFLPPFSGFKEQALEKVKNIFVSHSLKIKNKGTLHELTPLKIKELKNTYGDLDLAVKLGKIRKYNDKYYANTKGSLVRTDLFVDKENKFHAVSIYKADFSTKKLPNKTPATTSNGETKEGIEMNENYNFCMSLYKNTPVSVKIKGMKEPIICYYHGFNTSGSKITYKKHDNNYHNLSEDEMVVFRKNDKESIVVGKILEIKKYSISPSGELSLIENEKRKWF

SEQ ID NO: 866 - protein, 965 aa, Campylobacter coli
MKIIGFNLGIANIGWALRENDEIIDCGVRVFDIPENPKNGNSLALERRENKARMKIVKRKKARMLATKTFLKKELNVDLSKLFLIGSTQSIYELRTKALSSLISKEELSAIILHIAKHRGYDDSALKNENGTIIEALNKNKEAMLKFKSVGEYFYKNFVQNKEVKKIRNTTEDYSNSVPRSLLKQELDLILDKQKELGLIKNADFKEKLFEIIFFKRPLKDFSNKIGNCIFFENEKRAAKNTISACEFVALGKVVNLLKSIEKDIGIVYEKDSINEIMSIILDKTSISYKKIRDILNLPQDINFKGLDYSKNNAENSKLVDLKKLNEFKKALGDGFANLDKDILDSIATDITLTKDTATLKEKLKNYNVLNAEQIEKLSELVFNDHINLSLKALKQIIPLMYEGKRYDEACELCNFTIAKNQEKNEYLPLFEKTRFAKDISSPVVIRAICEFRKLLNDIIRRYGSVHKIHLELTRDFGISFNDRKKIIKEIEQNEQSRIKALETIKELKLEETSKNIQIVRLFEDQKGICPYSGLKMDLKCLDELVIDYIRPYNRSLDDSYSNKILTFKKLNDLKQGKTPFEAFGEDEKLWAEINERIKEYNGKKRFKIFDKFFKDKKPFDFTEQTLQDTRWLTKLVASYLNEYLLFLPINEDENTALGYGEKGSKQHVVLSSGMITQMLRNFWYLGFKNHKDYKNNAMDAIIVAFTTNSIIFAFNNFKKELDLAKAEFYANKISESDYLLKRKFLPPFSGFKEQALEKVKNIFVSHSLKIKNKGTLHELTPLKIKELKNTYGDLDLAVKLGKIRKYNDKYYANAKGSLVRTDLFADKENKFHAVSIYKADFSTKKLPNKTPATTSNGETKEGIEMNENYNFCMSLYKNTPISVKIKGMKEPIICYYHGFNTSGSKITYKKHDNNYHNLSEDEMVVFRKNDKESIVVGKILEIKKYSISPSGELSLIENEERKWF

SEQ ID NO: 867 - protein, 933 aa, Campylobacter coli
MKIIGFNLGIANIGWALRENDEIIDCGVRVFDIPENPKNGNSLALERRENKARMKIVKRKKARMLATKTFLKKELNVDLSKLFLIGSTQSIYELRTKALSSLISKEELSVIILHIAKHRGYDDSALKNENGTIIEALNKNKETMLKFKSVGEYFYKNFVQNKEVKKIRNTTEDYSNSVPRSLLKQELDLILDRQKELGLIKNADFKAKLFEIIFFKRPLKDFSNKIGNCIFFENEKRAAKNTISACEFVALGKVVNLLKSIEKDIGIVYEKDSINEIMSIILDKTSISYKKIRDILNLPQDINFKGLDYSKNNVENSKLVDLKKLNEFKKALGDGFTNLDKDILDSIATDITLTKDTATLKEKLKNYNVLNAEQIEKLSELVFNDHINLSLKALKQIIPLMYEGKRYDEACELCNFTIAKNQEKNEYLPLFEKTRFAKDISSPVVIRAICEFRKLLNDIIRRYGSVHKIHLELTRDFGISFNDRKKIIKEIEQNEQSRIKALETIKELKLEETSKNIQIVRLFEDQKGICPYSGLKMDLKCLDELVIDYIRPYNRSLDDSYSNKVLTFKKLNDLKQGKTPFEAFGEDEKLWAEINERIKEYNGKKRFKIFDKFFKDKKPFDFTEQTLQDTRWLTKLVASYLNEHLSFLPISEDENTALGYGEKGSKQHVILSSGMITQMLRNFWYLGFKNHKDYKNNAMDAIIVAFTTNSIIFTFNNFKKELDLAKAEFYANKISESDYLLKRKFLPPFSGFKEQALEKVKNIFVSHSLKIKNKGTLHELTPLKIKELKNTYGDLDLAVKLGKIRKYNDKYYANANGSLVRSDLFIDKKNKFHAVPIYKADFSTKKLPNKTPATTSNGETKEGIEMNENYNFCMSLYKNTPISVKIKGMKESIICYYHGFNTSGSKITYKKHDNNYHNLSEDEMVVFRKNDKE

SEQ ID NO: 868 - protein, 666 aa, Campylobacter jejuni
KGEKGTYFIEFKKYKEFIKALDEHSLSQDDLNEIAKDITLIKDEIKLKKALAKYDLKENQIDSLSKLEFKDHLNISFKALKLITPLMLEGKKYDEACNELNLKVAINEDKKDFLPAFNETYYKDEVTNPVVLRAIKEYRKILNALLKKYGKVHKINIELAREVGKNHSQRAKIEKEQNENYKAKKDAELECEKLGLKINSKNILKLRLFKEQKEFCVYSGEKIKLSDLQDEKMLEIDHIYPYSRSFDDSYMNKVLVFAKQNQEKLNKTPFEAFGNDSTKWQKIEVLTKNLPTKKQKRILDKNYKDKEQKDFKDRNLNDTRYIARLVLNYTKDYLDFLPLSDDENTKLNDTQKGSKVHVEAKSGMLTSALRHTWGFSTKDRNNHLHHAIDAAIIAYANNSIVKAFSDFKKEQESNSAELYAKKISELDYKNKRKFFEPFSGFRQKVLDKIDEIFVSKPERKKPSGALHEETFRKEEEFYQSYGGKEGVLKALELGKIRKVNGKIVKNGDMFRVDIFKHKKTNKFYAVPIYTMDFALKVLPNKAVARSKKGEIKDWILMDEDYEFCFSLYKDSLILIQTKDMQEPELVYFNAFTSSTVSLIVSKHDNKFETLSKNQKILFKNANEKEVIAKSIGIQNLKVFEKYIVSALGEVTKAEFRQREDFKNELR

SEQ ID NO: 869 - protein, 190 aa, Campylobacter jejuni
MAFDIGISSIGWAFSENDELKDCGVRIFTKVENPKTGESLALPRRLARSARKRLARRKARLNHLKHLIANEFKLNYEDYQSFDESLAKAYKGSLISPYELRFRALNELLSKQDFARVILHIAKRRGYDDIKNSDDKEKGAILKAIKQNEEKLANYQSVGEYLYKEYFQKFKENSKEFTNVRNKKKVMNAA

SEQ ID NO: 870 - protein, 985 aa, Campylobacter jejuni
MAKILAFDIGISSIGWAFVENDELKDCGVRIFTKAENPKTGESLALPRRLARSARKRLARRKARLNHLKHLIANEFKLNYEDYQSFDESLAKAYKGTLISPYELRFKALNELLSKQDLARVILHIAKRRGYDNIKNSDDKEKGAILKAVKENEEKLANYKSVGEYLYKEYFQKFKENSKEFINVRNKKESYERCIAQSFLKDELKLIFQKQREFGFNFSKKFEEEVLSVAFYKRALKDFSHLVGNCSFFVDEKRAPKNSPLAFEFVALTRIVNLLNNLNKNNSYIKDDLNALLSEVLKNGTLTYKQTKKILGLSDDYEFKGQKGNYFIEFKKYKEFIKALCEHNLNQDDLNEIAKDITLVKDETKLKKALAKYDLNQNQIENLSKIEFKDHLNISFKALKLIVPLMREGKKYDEVCNELNLKTAINEDKKEFLPAFNETYYKDEVNNPVVLRAIKEYRKVLNSLLKKYGKVHKINIELAREVGKNHRERSKIEKEQNENFKAKKDAELECEKLGLKINSKNILKLRLFKEQKEFCVYSGEKIKISDLQDEKMLEIDHIYPYSRSFDDSYMNKVLVFTKQNQEKLNKTPFEAFGKDDVKWQKIETLAKNLPAKKQKRILDKNYKDKEQKDFKDRNLNDTRYIARLVLNYTKDYLEFLPLSDDENIKLNDTQKGSKVHVEAKSGMLTSVLRHTWGFSTKDRNNHLHHAIDAVIIAYANASVVKAFSDFKKEQENYTAELYAKKINELDFKNKRKFFEPFSNFRQKVLEKIDEIFVSKPERKKPSGALHEETFYKEEEFYKEYGGKEGVLKALELGKIRKVNGKIVSNANMFRVDIFKYKKTNKFYAVPIYTMDFALGILPNKAVVGGKDKQGIIKDWLLMDENYEFCFSLYKDSLILLQTKDMQEPELVYFKSFKSSTAGLVVSKHDNKFENLNENQKKLFKSANEKKVVAEGIGIQNLKVFEKYIVSALGEITKAEIKERENFKKK

SEQ ID NO: 871 - protein, 987 aa, Campylobacter jejuni
MARILAFDIGISSIGWAFSENDELKDCGVRIFTKAENPKTGESLALPRCLARSARKRLARRKARLNHLKHLIANEFKLNYEDYQSFDESLAKAYKGSLISPYELRFRALNELLSKQDFARVILHIAKRRGYDDIKNNGDEEKGEILKAIKQNEEKLVSYQSVGEYLYKEYFQKFKENSKEFINVRNKKESYERCIAQSFLKDELKLIFQKQRKFGFSFSKKFEEEVLSVAFYKRALKDFSHLVGNCSFFTDEKRAPKNSPLAFMFVALTRIINLLNNLKNTEGILYTKDDLNTLLNEVLKNGTLTYKQTKKLLGLSNDYEFKGEKGTYFIEFQKYKEFVKALGEHNLSQDDLNEIAKDITLIKDEIKLKKALAKYDLNQNQIDSLSKLEFKDHLNISFKALKLITPLMLEGKKYDEACNELNLKVAINEDKKDFLPAFNETYYKDEVTNPVVLRAIKEYRKVLNALLKKYGKVHKINIELAREVGKNHSQRAKIEKEQNENYKAKKDAELECEKLGLKINSKNILKLRLFKEQKEFCVYSGEKIKISDLQDEKMLEIDHIYPYSRSFDDSYMNKVLVFTKQNQEKLNKTPFETFGNDRVKWQKIEVLAKNLPTKKQKRILDKNYKDKEQKDFKDRNLNDTRYIARLVLNYTKDYLDFLPLSDDENTKLNDTQKGSKVHVEAKSGMLTSTLRHTWGFSTKDRNNHLHHAIDAAIIAYANNSIVKAFSDFKKEQESNTAELYAKKISELDYKNKRKFFEPFSGFRQKLLDKIDEIFVSKPERKKPSGALHEETFRKEEEFYQSYGGKEGVLKALELGKIRKVNGKIVSNGDMFRVDIFKHKKTNKFYAVPIYTMDFALKVLPNKAVVQGKDKKSGLIKDWILMDENYEFCFSLYKDSLILIQTKDMQEPELVYYERLDSSNASLTVSKHDNKFETLSKNQKILFKNANEKEVIAKSIGIQNLKVFEKYIVSALGEVTKAEFRQREDFKK

SEQ ID NO: 872 - protein, 987 aa, Campylobacter jejuni
MARILAFDIGISSIGWAFSENDELKDCGVRIFTKAENPKTGESLALPRRLARSARKRLARRKARLNHLKHLIANEFKLNYEDYQSFDEGLAKAYKGSLISPYELRFRALNELLSKQDFARVILHIAKRRGYDDIKNNGDEEKSEILKAIKQNEEKLVNYQSVGEYLYKEYFQKFKENSKEFINVRNKKESYERCIAQSFLKDELKLIFQKQREFGFSFSKKFEEEVLSVAFYKRALKDFSHLVGNCSFFTDEKRAPKNSPLAFMFVALTRIINLLNNLKNTEGILYTKDDLNTLLNEVLKNGTLTYKQTKKLLGLSDDYEFKGEKGTYFIEFKKYKEFIKALGEHNLSQDNLNEIAKDITLIKDEIKLKKALAKYDLNQNQIDSLSKLEFKDHLNISFKALKLITPLMLEGKKYDEAYNELNLKVAINEDKKDFLPAFNETYYKDEVTNPVVLRAIKEYRKVLNALLKKYGKVHKINIELAREVGKNHSQRAKIEKEQNENYKAKKDAELECEKLGLKINSKNILKLRLFKEQKEFCAYSGEKIKISDLQDEKMLEIDHIYPYSRSFDDSYMNKVLVFTKQNQEKLNQTPFEAFGNDSAKWQKIEVLAKNLPTKKQKRILDKNYKDKEQKDFKDRNLNDTRYIARLVLNYTKDYLDFLPLSDDENTKLNDTQKGSKVHVEAKSGMLTSALRHTWGFSAKDRNNHLHHAIDAVIIAYANNSIVKAFSDFKKEQESNSAELYAKKISELDYKNKRKFFEPFSGFRQKVLDKIDEIFVSKPERKKPSGALHEETFRKEEEFYQSYGGKEGVLKALELGKIRKVNGKIVKNGDMFRVDIFKHKKTNKFYAVPIYTMDFALKVLPNKAVVQGKDKKSGLIKDWILMDENYEFCFSLYKDSLILIQTKDMQEPELVYFNAFTSSTVSLIVSKHDNKFETLSKNQKILFKNANEKEVIAKSIGIQNLKVFEKYIVSALGEVTKAEFRQREDFKK

SEQ ID NO: 873 - protein, 961 aa, Campylobacter jejuni
MARILAFDIGISSIGWAFSENDELKDCGVRIFTKAENPKTGESLALPRRLARSARKRLARRKARLNHLKHLIANEFKLNYEDYQSFDESLAKAYKGSLISPYELRFRALNELLSKQDFARVILHIAKRRGYDDIKNNGDEEKGKILKAIKQNEEKLVNYQSVGEYLYKEYFQKFKENSKEFINVRNKKESYERCITQSFLKYELKLIFQKQREFGFSFSKKFEEEVLSVAFYKRALKDFSHLVGNCSFFSDEKRAPKNSPLAFMFVALTRIINLLNNLKNTEGILYTKDDLNALLNEVLKNGTLTYKQTKKLLGLSDDYEFKGEKGTYFIEFKKYKEFIKALGEHNLSQDDLNEIAKDITLIKDEIKLKKALAKYDLNQNQIDSLSKLEFKDHLNIGFKALKLITPLMLEGKKYDEACNELNLKVAINEDKKDFLPAFNETYYKDEVTNPVVLRAIKEYRKVLNALLKKYGKVHKINIELAREVGKNHSQRAKIEKEQNENYKAKKDAELECEKLGLKINSKNILKLRLFKEQKEFCAYSGEKIKLSDLQDEKMLEIDHIYPYSRSFDDSYMNKVLVFTKQNQEKLNKTPFEAFGNDNVKWQKIEVLAKNLPEKKQKRILDKNYKDKEQKDFKDRNLNDTRYIARLVLNYTKDYLDFLPLSDDENTKLKGSKVHVEAKSGMLTSALRHTWGFSTKDRNNHLHHAIDAAIIAYANNSIVKDFSDFKKEQESNSAELYAKKISELDYKNKRKFFEPFSGFRQKVLDKIDEIFVSKPERKKPSGALHEETFRKEEEFYQSYGGKEGVLKALELGKIRKVNGKIVKNGDMFRVDIFKHKKTNKFYAVPIYTMDFALKVLPNKAVARSKKGEIKDWILMDENYEFCFSLYKDSLILIQTKDMQEPELVYFNAFTSSTVSLIVSKHDNKFETLSKNLKVFEKYIVSALGEVTKAEFRQREDFKNELR

SEQ ID NO: 874 - protein, 984 aa, Campylobacter jejuni
MARILAFDIGISSIGWAFSENDELKDCGVRIFTKAENPKTGESLALPRRLARSARKRLARRKARLNHLKHLIANEFKLNYEDYQSFDESLAKAYKGSLISPYELRFRALNELLSKQDFARVILHIAKRRGYDDIKNNGDEEKGKILKAIKQNEEKLVNYQSVGEYLYKEYFQKFKENSKEFINVRNKKESYERCITQSFLKYELKLIFQKQREFGFSFSKKFEEEVLSVAFYKRALKDFSHLVGNCSFFTDEKRAPKNSPLAFMFVALTRIINILNNLKNTEGILYTKDDLNALLNEVLKNGTLTYKQTKKLLGLSDDYEFKGEKGTYFIEFKKYKEFIKALGEHNLSQDDLNEIAKDITLIKDEIKLKKALAKYDLNQNQIDSLSKLEFKDHLNISFKALKLITPLMLEGKKYDEACNELNLKVAINEDKKDFLPAFNETYYKDEVTNPVVLRAIKEYRKILNALLKKYGKVHKINIELAREVGKNHSQRAKIEKEQNENYKAKKDAEIECEKLGLKINSKNILKLRLFKEQKEFCAYSGEKIKISDLQDEKMLEIDHIYPYSRSFDDSYMNKVLVFTKQNQEKLNQTPFEAFGNDSAKWQKIEVLAKNLPTKKQKRILDKNYKDKEQKDFKDRNLNDTRYIARLVLNYTKDYLDFLPLSDDENTKLNDTQKGSKVHVEAKSGMLTSALRHTWGFSAKDRNNHLHHAIDAVIIAYANNSIVKAFSDFKKEQESNSAELYAKKISELDYKNKRKFFEPFSGFRQKVLDKIDEIFVSKPERKKPSGALHEETFRKEEEFYQSYGGKEGVLKALELGKIRKVNGKIVKNGDMFRVDIFKHKKTNKFYAVPIYTMDFALKVLPNKAVARSKKGEIKDWILMDENYEFCFSLYKDSLILIQTKDMQEPEFVYYNAFTSSTVSLIVSKHDNKFETLSKNQKILFKNANEKEVIAKSIGIQNLKVFEKYIVSALGEVTKAEFRQREDFKK

SEQ ID NO: 875 - protein, 987 aa, Campylobacter jejuni
MARILAFDIGISSIGWAFSENDELKDCGVRIFTKAENPKTGESLALPRRLARSARKRLARRKARLNHLKHLIANEFKLNYEDYQSFDESLAKAYKGSLISPYELRFRALNELLSKQDFARVILHIAKRRGYDDIKNNGDEEKGKILKAIKQNEEKLVSYQSVGEYLYKEYFQKFKENSKEFINVRNKKESYERCIAQSFLKDELKLIFQKQREFGFSFSKKFEEEVLSVAFYKRALKDFSHLVGNCSFLLMKKERQKNSPLAFMFVALTRIINLLNNLKNTEGILYTKDDLNTLLNEALKNGTLTYKQTKKLLGLSNDYEFKGEKGTYFIEFQKYKEFVKALGEHNLSQDDLNEIAKDITLIKDEIKLKKALAKYDLNQNQIDSLSKLEFKDHLNISFKALKLITPLMLEGKKYDEACNELNLKVAINEDKKDFLPAFNETYYKDEVTNPVVLRAIKEYRKVLNALLKKYGKVHKINIELAREVGKNHSQRAKIEKEQNENYKAKKDAELECEKLGLKINSKNILKLRLFKEQKEFCVYSGEKIKISDLQDEKMLEIDHIYPYSRSFDDSYMNKVLVFTKQNQEKLNKTPFETFGNDRVKWQKIEVLAKNLPTKKQKRILDKNYKDKEQKDFKDRNLNDTRYIARLVLNYTKDYLDFLPLSDDENTKLNDTQKGSKVHVEAKSGMLTSTLRHTWGFSTKDRNNHLHHAIDAAIIAYANNSIVKAFSDFKKEQESNTAELYAKKISELDYKNKRKFFEPFSGFRQKLLDKIDEIFVSKPERKKPSGALHEETFRKEEEFYQSYGGKEGVLKALELGKIRKVNGKMVKNGDMFRVDIFKHKKTNKFYAVPIYTMDFALKVLPNKAVVQGKDKKSGLIKDWILMDENYEFCFSLYKDSLILIQTKDMQEPELVYYERLDSSNASLTVSKHDNKFETLSKNQKILFKNANEKEVIAKSIGIQNLKVFEKYIVSALGEVTKAEFRQREDFKK

SEQ ID NO: 876 - protein, 987 aa, Campylobacter jejuni
MARILAFDIGISSIGWAFSENDELKDCGVRIFTKAENPKTGESLALPRRLARSARKRLARRKARLNHLKHLIANEFKLNYEDYQSFDESLAKAYKGSLISPYELRFRALNELLSKQDFARVILHIAKRRGYDDIKNNGDEEKSEILKAIKQNEEKLVNYQSVGEYLYKEYFQKFKENSKEFINVRNKKESYERCIAQSFLKDELKLIFQKQREFGFSFSKKFEEEVLSVAFYKRALKDFSHLVGNCSFFTDEKRAPKNSPLAFMFVALTRIINLLNNLKNTEGILYTKDDLNTLLNEVLKNGTLTYKQTKKLLGLSDDYEFKGEKGTYFIEFKKYKEFIKALGEHNLSQDNLNEIAKDITLIKDEIKLKKALAKYDLNQNQIDSLSKLEFKDHLNISFKALKLITPLMLEGKKYDEAYNELNLKVAINEDKKDFLPAFNETYYKDEVTNPVVLRAIKEYRKVLNALLKKYGKVHKINIELAREVGKNHSQRAKIEKEQNENYKAKKDAELECEKLGLKINSKNILKLRLFKEQKEFCAYSGEKIKISDLQDEKMLEIDHIYPYSRSFDDSYMNKVLVFTKQNQEKLNQTPFEAFGNDSAKWQKIEVLAKNLPTKKQKRILDKNYKDKEQKDFKDRNLNDTRYIARLVLNYTKDYLDFLPLSDDENTKLNDTQKGSKVHVEAKSGMLTSALRHTWGFSAKDRNNHLHHAIDAVIIAYANNSIVKAFSDFKKEQESNSAELYAKKISELDYKNKRKFFEPFSGFRQKVLDKIDEIFVSKPERKKPSGALHEETFRKEEEFYQSYGGKEGVLKALELGKIRKVNGKIVKNGDMFRVDIFKHKKTNKFYPVPIYTMDFALKVLPNKAVVQGKDKKSGLIKDWILMDENYEFCFSLYKDSLILIQTKDMQEPELVYFNAFTSSTVSLIVSKHDNKFETLSKNQKILFKNANEKEVIAKSIGIQNLKVFEKYIVSALGEVTKAEFRQREDFKK

SEQ ID NO: 877 - protein, 987 aa, Campylobacter jejuni
MARILAFDIGISSIGWAFSENDELKDCGVRIFTKAENPKTGESLALPRRLARSARKRLARRKARLNHLKHLIANEFKLNYEDYQSFDESLAKAYKGSLISPYELRFRALNELLSKQDFARVILHIAKRRGYDDIKNNGDEEKSEILKAIKQNEEKLVNYQSVGEYLYKEYFQKFKENSKEFINVRNKKESYERCIAQSFLKDELKLIFQKQREFGFSFSKKFEEEVLSVAFYKRALKDFSHLVGNCSFFTDEKRAPKNSPLAFMFVALTRIINLLNNLKNTEGILYTKDDLNTLLNEVLKNGTLTYKQTKKLLGLSDDYEFKGEKGTYFIEFKKYKEFIKALGEHNLSQDNLNEIAKDITLIKDEIKLKKALAKYDLNQNQIDSLSKLEFKDHLNISFKALKLITPLMLEGKKYDEAYNELNLKVAINEDKKDFLPAFNETYYKDEVTNPVVLRAIKEYRKVLNALLKKYGKVHKINIELAREVGKNHSQRAKIEKEQNENYKAKKDAELECEKLGLKINSKNILKLRLFKEQKEFCAYSGEKIKISDLQDEKMLEIDHIYPYSRSFDDSYMNKVLVFTKQNQEKLNQTPFEAFGNDSAKWQKIEVLAKNLPTKKQKRILDKNYKDKEQKDFKDRNLNDTRYIARLVLNYTKDYLDFLPLSDDENTKLNDTQKGSKVHVEAKSGMLTSALRHTWGFSAKDRNNHLHHAIDAVIIAYANNSIVKAFSDFKKEQESNSAELYAKKISELDYKNKRKFFEPFSGFRQKVLDKIDEIFVSKPERKKPSGALHEETFRKEEEFHQSYGGKEGVLKALELGKIRKVNGKIVKNGDMFRVDIFKHKKTNKFYAVPIYTMDFALKVLPNKAVVQGKDKKSGLIKDWILMDENYEFCFSLYKDSLILIQTKDMQEPELVYFNAFTSSTVSLIVSKHDNKFETLSKNQKILFKNANEKEVIAKSIGIQNLKVFEKYIVSALGEVTKAEFRQREDFKK

SEQ ID NO: 878 - protein, 987 aa, Campylobacter jejuni
MARILAFDIGISSIGWAFSENDELKDCGVRIFTKAENPKTGESLALPRRLARSARKRLARRKARLNHLKHLIANEFKLNYEDYQSFDESLAKAYKGSLISPYELRFRALNELLSKQDFARVILHIAKRRGYDDIKNNGDEEKSEILKAIKQNEEKLVNYQSVGEYLYKEYFQKFKENSKEFINVRNKKESYERCIAQSFLKDELKLIFQKQREFGFSFSKKFEEEVLSVAFYKRALKDFSHLVGNCSFFTDEKRAPKNSPLAFMFVALTRIINLLNNLKNTEGILYTKDDLNTLLNEVLKNGTLTYKQTKKLLGLSDDYEFKGEKGTYFIEFKKYKEFIKALGEHNLSQDNLNEIAKDITLIKDEIKLKKALAKYDLNQNQIDSLSKLEFKDHLNISFKALKLITPLMLEGKKYDEAYNELNLKVAINEDKKDFLPAFNETYYKDEVTNPVVLRAIKEYRKVLNALLKKYGKVHKINIELAREVGKNHSQRAKIEKEQNENYKAKKDAELECEKLGLKINSKNILKLRLFKEQKEFCAYSGEKIKISDLQDEKMLEIDHIYPYSRSFDDSYMNKVLVFTKQNQEKLNQTPFEAFGNDSAKWQKIEVLAKNLPTKKQKRILDKNYKDKEQKDFKDRNLNDTRYIARLVLNYTKDYLDFLPLSDDENTKLNDTQKGSKVHVEAKSGMLTSALRHTWGFSAKDRNNHLHHAIDAVIIAYANNSIVKAFSDFKKEQESNSAELYAKKISELDYKNKRKFFEPFSGFRQKVLDKIDEIFVSKPERKKPSGALHEETFRKEEEFYQSYGGKEGVLKALELGKIRKVNGKIVKNGDMFRVDIFKHKKTNKFYAVPIYTMDFALKVLPNKAVVQGKDKKSGLIKDWILMDENYEFCFSLYKDSLILIQTKDMQEPELVYFNAFTSSTVSLIVSKHDNKFETLSKNQKILFKNANEKEVIAKSIGIQNLKVFEKYIVSALGEVTKAEFRQREDFKK

SEQ ID NO: 879 - protein, 861 aa, Campylobacter jejuni
MARILAFDIGISSIGWAFSENDELKDCGVRIFTKAENPKTGESLALPRRLARSARKRLARRKARLNHLKHLIANEFKLNYEDYQSFDESLAKAYKGSLISPYELRFRALNELLSKQDFARVILHIAKRRGYDDIKNNGDEEKSEILKAIKQNEEKLVNYQSVGEYLYKEYFQKFKENSKEFINVRNKKESYERCITQSFLKDELKLIFQKQREFGFSFSKKFEEEVLSVAFYKRALKDFSHLVGNCSFFTDEKRAPKNSPLAFMFVALTRIINILNNLKNTEGILYTKDDLNALLNEVLKNGTLTYKQTKKLLGLSDDYEFKGEKGTYFIEFKKYKEFIKALGEHNLSQDDLNEIAKDITLIKDEIKLKKALAKYDLNQNQIDSLSKLEFKDHLNISFKALKLITPLMLEGKKYDEACNELNLKVAINEDKKDFLPAFNETYYKDEVTNPVVLRAIKEYRKILNALLKKYGKVHKINIELAREVGKNHSQRAKIEKEQNENYKAKKDAEIECEKLGLKINSKNILKLRLFKEQKEFCAYSGEKIKLSDLQDEKMLEIDHIYPYSRSFDDSYMNKVLVFTKQNQEKLNKTPFEAFGNDSTKWQKIEVLAKNLPEKKQKRILDKNYKDKEQKDFKDRNLNDTRYIARLVLNYTKDYLDFLPLSDDENTKLNDTQKGSKVHVEAKSGMLTSALRHTWGFSAKDRNNHLHHAIDAAIIAYANNSIVKAFSDFKKEQESNSVELYAKKISELDYKNKRKFFEPFSGFRQKVLDKIDEIFVSKPERKKPSGALHEETFRKEEEFYQSYGGKEGVLKALELGKIRKVNGKIVKNGDMFRVDIFKHKKTNKFLCCANLYYGFCFKSITK

SEQ ID NO: 880 - protein, 462 aa, Campylobacter jejuni
MARILAFDIGISSIGWAFSENDELKDCGVRIFTKAENPKTGESLALPRRLARSARKRLARRKARLNHLKHLIANEFKLNYEDYQSFDESLAKAYKGSLISPYELRFRALNELLSKQDFARVILHIAKRRGYDDIKNNGDEEKSEILKAIKQNEEKLVNYQSVGEYLYKEYFQKFKENSKEFINVRNKKESYERCITQSFLKDELKLIFQKQREFGFSFSKKFEEEVLSVAFYKRALKDFSHLVGNCSFFTDEKRAPKNSPLAFMFVALTRIINILNNLKNTEGILYTKDDLNALLNEVLKNGTLTYKQTKKLLGLSDDYEFKGEKGTYFIEFKKYKEFIKALGEHNLSQDDLNEIAKDITLIKDEIKLKKALAKYDLNQNQIDSLSKLEFKDHLNISFKALKLITPLMLEGKKYDEACNELNLKVAINEDKKDFLPAFNETYYKDEVTNPVVLRAIKEYRKS

SEQ ID NO: 881 - protein, 984 aa, Campylobacter jejuni
MARILAFDIGISSIGWAFSENDELKDCGVRIFTKAENPKTGESLALPRRLARSARKRLARRKARLNHLKHLIANEFKLNYEDYQSFDESLAKAYKGSLISPYELRFRALNELLSKQDFARVILHIAKRRGYDDIKNNGDEEKSEILKAIKQNEEKLVNYQSVGEYLYKEYFQKFKENSKEFINVRNKKESYERCITQSFLKDELKLIFQKQREFGFSFSKKFEEEVLSVAFYKRALKDFSHLVGNCSFFTDEKRAPKNSPLAFMFVALTRIINLLNNLKNTEGILYTKDDLNALLNEVLKNGTLTYKQTKKLLGLSDDYEFKGEKGTYFIEFKKYKEFIKALDEHSLSQDDLNEIAKDITLIKDEIKLKKALAKYDLNQNQIDSLSKLEFKDHLNISFKALKLITPLMLEGKKYDEACNELNLKVAINEDKKDFLPAFNETYYKDEVTNPVVLRAIKEYRKILNALLKKYGKVHKINIELAREVGKNHSQRAKIEKEQNENYKAKKDAEIECEKLGLKINSKNILKLRLFKEQKEFCAYSGEKIKISDLQDEKMLEIDHIYPYSRSFDDSYMNKVLVFTKQNQEKLNKTPFEAFGNDGVKWQKIEVLAKNLPEKKQKRILDKNYKDKEQKDFKDRNLNDTRYIARLVLNYTKDYLDFLPLSDDENTKLNDTQKGSKVHVEAKSGMLTSALRHTWGFSTKDRNNHLHHAIDAAIIAYANNSIVKAFSDFKKEQESNSAELYAKKISELDYKNKRKFFEPFSGFRQKVLDKIDEIFVSKPERKKPSGALHEETFRKEEEFYQSYGGKEGVLKALELGKIRKVNGKIVKNGDMFRVDIFKHKKTNKFYAVPIYTMDFALKVLPNKAVARSKKGEIKDWILMDENYEFCFSLYKDSLILIQTKDMQEPELVYFNAFTSSTVSLVVSKHDNKFETLSKNQKILFKNANEKEVIAKSIGIQNLKVFEKYIVSALGEVTKAEFRQREDFKK

SEQ ID NO: 882 - protein, 984 aa, Campylobacter jejuni
MARILAFDIGISSIGWAFSENDELKDCGVRIFTKAENPKTGESLALPRRLARSARKRLARRKARLNHLKHLIANEFKLNYEDYQSFDESLAKAYKGSLISPYELRFRALNELLSKQDFARVILHIAKRRGYDDIKNSDDKEKGAILKAIKQNEEKLANYQSVGEYLYKEYFQKFKENSKEFTNVRNKKESYERCIAQSFLKDELKLIFKKQREFGFSFSKKFEEEVLSVAFYKRALKDFSHLVGNCSFFTDEKRAPKNSPLAFMFVALTRIINLLNNLKNTEGILYTKDDLNALLNEVLKNGTLTYKQTKKLLGLSDDYEFKGEKGTYFIEFKKYKEFIKALGDHSLSQDDLNEIAKDITLIKDEIKLKKALAKYDLNQNQIDSLSKLEFKDHLNISFKALKLITPLMLEGKKYDEACNELNLKVAINEDKKDFLPAFNETYYKDEVTNPVVLRAIKEYRKVLNALLKKYGKVHKINIELAREVGKNYSQRAKIEKEQNENYKAKKDAELECEKLGLKINSKNILKLRLFKEQKEFCAYSGEKIKISDLQDEKMLEIDHIYPYSRSFDDSYMNKVLVFTKQNQEKLNQTPFEAFGNDSAKWQKIEVLAKNLPTKKQKRILDKNYKDKEQKDFKDRNLNDTRYIARLVLNYTKDYLDFLPLSDDENTKLNDTQKGSKVHVEAKSGMLTSALRHTWGFSAKDRNNHLHHAIDAVIIAYANNSIVKAFSDFKKEQESNSAELYAKKISELDYKNKRKFFEPFSGFRQKVLDKIDEIFVSKPERKKPSGALHEETFRKEEEFYQSYGGKEGVLKALELGKIRKVNGKIVKNGDMFRVDIFKHKKTNKFYAVPIYTMDFALKVLPNKAVARSKKGEIKDWILMDENYEFCFSLYKDSLILIQTKDMQEPEFVYYNAFTSSTVSLIVSKHDNKFETLSKNQKILFKNANEKEVIAKSIGIQNLKVFEKYIVSALGEVTKAEFRQREDFKK

SEQ ID NO: 883 - protein, 984 aa, Campylobacter jejuni
MARILAFDIGISSIGWAFSENDELKDCGVRIFTKAENPKTGESLALPRRLARSARKRLARRKARLNHLKHLIANEFKLNYEDYQSFDESLAKAYKGSLISPYELRFRALNELLSKQDFARVILHIAKRRGYDDIKNSDDKEKGAILKAIKQNEEKLANYQSVGEYLYKEYFQKFKENSKEFTNVRNKKESYERCIAQSFLKDELKLIFKKQREFGFSFSKKFEEEVLSVAFYKRALKDFSHLVGNCSFFTDEKRAPKNSPLAFMFVALTRIINLLNNLKNTEGILYTKDDLNTLLNEVLKNGTLTYKQTKKLLGLSDDYEFKGEKGTYFIEFKKYKEFIKALGEHNLSQDDLNEIAKDITLIKDEIKLKKALAKYDLNQNQIDSLSKLEFKDHLNISFKALKLITPLMLEGKKYDEACNELNLKVAINEDKKDFLPAFNETYYKDEVTNPVVLRAIKEYRKVLNALLKKYGKVHKINIELAREVGKNYSQRAKIEKEQNENYKAKKDAELECEKLGLKINSKNILKLRLFKEQKEFCAYSGEKIKISDLQDEKMLEIDHIYPYSRSFDDSYMNKVLVFTKQNQEKLNKTPFEAFGNDSTKWQKIEVLAKNLPEKKQKRILDKNYKDKEQKDFKDRNLNDTRYIARLVLNYTKDYLDFLPLSDDENTKLNDTQKGLKVHVEAKSGMLTSALRHTWGFSAKDRNNHLHHAIDAVIIAYANNSIVKAFSDFKKEQESNSAELYAKKISELDYKNKRKFFEPFSGFRQKVLDKIDEIFVSKPERKKPSGALHEETFRKEEEFYQSYGGKEGVLKALELGKIRKVNGKIVKNGDMFRVDIFKHKKTNKFYAVPIYTMDFALKVLPNKAVARSKKGEIKDWILMDENYEFCFSLYKDSLILIQTKDMQEPEFVYYNAFTSSTVSLIVSKHDNKFETLSKNQKILFKNANEKEVIAKSIGIQNLKVFEKYIVSALGEVTKAEFRQREDFKK

SEQ ID NO: 884 - protein, 984 aa, Campylobacter jejuni
MARILAFDIGISSIGWAFSENDELKDCGVRIFTKAENPKTGESLALPRRLARSARKRLARRKARLNHLKHLIANEFKLNYEDYQSFDESLAKAYKGSLISPYELRFRALNELLSKQDFARVILHIAKRRGYDDIKNSDDKEKGAILKAIKQNEEKLANYQSVGEYLYKEYFQKFKENSKEFTNVRNKKESYERCIAQSFLKDELKLIFKKQREFGFSFSKKFEEEVLSVAFYKRALKDFSHLVGNCSFFTDEKRAPKNSPLAFMFVALTRIINLLNNLKNTEGILYTKDDLNALLNEVLKNGTLTYKQTKKLLGLSDDYEFKGEKGTYFIEFKKYKEFIKALGDHSLSQDDLNEIAKDITLIKDEIKLKKALAKYDLNQNQIDSLSKLEFKDHLNISFKALKLITPLMLEGKKYDEACNELNLKVAINEDKKDFLPAFNETYYKDEVTNPVVLRAIKEYRKVLNALLKKYGKVHKINIELAREVGKNYSQRAKIEKEQNENYKAKKDAELECEKLGLKINSKNILKLRLFKEQKEFCAYSGEKIKISDLQDEKMLEIDHIYPYSRSFDDSYMNKVLVFTKQNQEKLNQTPFEAFGNDSAKWQKIEVLAKNLPTKKQKRILDKNYKDKEQKNFKDRNLNDTRYIARLVLNYTKDYLDFLPLSDDENTKLNDTQKGSKVHVEAKSGMLTSALRHTWGFSAKDRNNHLHHTIDAVIIAYANNSIVKAFSDFKKEQESNSAELYAKKISELDYKNKRKFFEPFSGFRQKVLDKIDEIFVSKPERKKPSGALHEETFRKEEEFYQSYGGKEGVLKALELGKIRKVNGKIVKNGDMFRVDIFKHKKTNKFYAVPIYTMDFALKVLPNKAVARSKKGEIKDWILMDENYEFCFSLYKDSLILIQTKDMQEPEFVYYNAFTSSTVSLIVSKHDNKFETLSKNQKILFKNANEKEVIAKSIGIQNLKVFEKYIVSALGEVTKAEFRQREDFKK

SEQ ID NO: 885 - protein, 984 aa, Campylobacter jejuni
MARILAFDIGISSIGWAFSENDELKDCGVRIFTKAENPKTGESLALPRRLARSARKRLARRKARLNHLKHLIANEFKLNYEDYQSFDESLAKAYKGSLISPYELRFRALNELLSKQDFARVILHIAKRRGYDDIKNSDDKEKGAILKAIKQNEEKLANYQSVGEYLYKEYFQKFKENSKEFTNVRNKKESYERCIAQSFLKDELKLIFKKQREFGFSFSKKFEEEVLSVAFYKRALKDFSHLVGNCSFFTDEKRAPKNSPLAFMFVALTRIINLLNNLKNTEGILYTKDDLNTFLNEVLKNGTLTYKQTKKLLGLSDDYEFKGEKGTYFIEFKKYKEFIKALGDHNLSQDDLNEIAKDITLIKDEIKLKKALAKYDLNQNQIDSLSKLEFKDHLNISFKALKLITPLMLEGKKYDEACNELNLKVAINEDKKDFLPAFNETYYKDEVTNPVVLRAIKEYRKVLNALLKKYGKVHKINIELAREVGKNHSQRAKIEKEQNENYKAKKDAELECEKLGLKINSKNILKLRLFKEQKEFCAYSGEKIKISDLQDEKMLEIDHIYPYSRSFDDSYMNKVLVFTKQNQEKLNKTPFEAFGNDSAKWQKIEVLAKNLPTKKQKRILDKNYKDKEQKDFKDRNLNDTRYIARLVLNYTKDYLDFLPLSDDENTKLNDTQKGSKVHVEAKSGMLTSALRHTWGFSTKDRNNHLHHAIDAVIIAYANNSIVKAFSDFKKEQESNSAELYAKKISELDYKNKRKFFEPFSGFRQKVLDKIDEIFVSKPERKKPSGALHEETFRKEEEFYQSYGGKEGVLKALELGKIRKVNGKIVKNGDMFRVDIFKHKKTNKFYAVPIYTMDFALKVLPNKAVARSKKGEIKDWILMDENYEFCFSLYKDSLILIQTKDMQEPEFVYYNAFTSSTVSLIVSKHDNKFETLSKNQKILFKNANEKEVIAKSIGIQNLKVFEKYIVSALGEVTKAEFRQREDFKK

SEQ ID NO: 886 - protein, 987 aa, Campylobacter jejuni
MARILAFDIGISSIGWAFSENDELKDCGVRIFTKAENPKTGESLALPRRLARSARKRLARRKARLNHLKHLIANEFKLNYEDYQSFDESLAKAYKGSLISPYELRFRALNELLSKQDFARVILHIAKRRGYDDIKNSDDKEKGAILKAIKQNEEKLANYQSVGEYLYKEYFQKFKENSKEFTNVRNKKESYERCIAQSFLKDELKLIFKKQREFGFSFSKKFEEEVLSVAFYKRALKDFSHLVGNCSFFTDEKRAPKNSPLAFMFVALTRIINLLNNLKNTEGILYTKDDLNTLLNEVLKNGTLTYKQTKKLLGLSDDYEFKGEKGTYFIEFKKYKEFIKSLGDHSLSQDDLNEIAKDITLIKDEIKLKKALAKYDLNQNQIDSLSKLEFKDHLNISFKALKLITPLMLEGKKYDEACNELNLKVAINEDKKDFLPAFNETYYKDEVTNPVVLRAIKEYRKVLNALLKKYGKVHKINIELAREVGKNHSQRAKIEKEQNENYKAKKDAELECEKLGLKINSKNILKLRLFKEQKEFCAYSGEKIKISDLQDEKMLEIDHIYPYSRSFDDSYMNKVLVFTKQNQEKLNQTPFEAFGNDSAKWQKIEVLAKNLPTKKQKRILDKNYKDKEQKNFKDRNLNDTRYIARLVLNYTKDYLDFLPLSDDENTKLNDTQKGSKVHVEAKSGMLTSALRHTWGFSAKDRNNHLHHAIDAVIIAYANNSIVKAFSDFKKEQESNSAELYAKKISELDYKNKRKFFEPFSGFRQKVLDKIDEIFVSKPERKKPSGALHEETFRKEEEFYQSYGGKEGVLKALELGKIRKVNGKIVKNGDMFRVDIFKHKKTNKFYAVPIYTMDFALKVLPNKAVARSKKGEIKDWILMDENYEFCFSLYKDSLILIQTKDMQEPEFVYYNAFTSSTVSLIVSKHDNKFETLSKNQKILFKNANEKEVIAKSIGIQNLKVFEKYIVSALGEVTKAEFRQREDFKNELR

SEQ ID NO: 887 - protein, 987 aa, Campylobacter jejuni
MARILAFDIGISSIGWAFSENDELKDCGVRIFTKAENPKTGESLALPRRLARSARKRLARRKARLNHLKHLIANEFKLNYEDYQSFDESLAKAYKGSLISPYELRFRALNELLSKQDFARVILHIAKRRGYDDIKNSDDKEKGAILKAIKQNEEKLANYQSVGEYLYKEYFQKFKENSKEFTNVRNKKESYERCIAQSFLKDELKLIFKKQREFGFSFSKKFEEEVLSVAFYKRALKDFSHLVGNCSFFTDEKRAPKNSPLAFMFVALTRIINLLNNLKNTEGILYTKDDLNALLNEVLKNGTLTYKQTKKLLGLSDDYEFKGEKGTYFIEFKKYKEFIKALGDHSLSQDDLNEIAKDITLIKDEIKLKKALVKYDLNQNQIDSLSKLEFKDHLNISFKALKLITPLMLEGKKYDEACNELNLKVAINEDKKDFLPAFNETYYKDEVTNPVVLRAIKEYRKVLNALLKKYGKVHKINIELAREVGKNYSQRAKIEKEQNENYKAKKDAELECEKLGLKINSKNILKLRLFKEQKEFCAYSGEKIKISDLQDEKMLEIDHIYPYSRSFDDSYMNKVLVFTKQNQEKLNQTPFEAFGNDSAKWQKIEVLAKNLPTKKQKRILDKNYKDKEQKDFKDRNLNDTRYIARLVLNYTKDYLDFLPLSDDENTKLNDTQKGSKVHVEAKSGMLTSALRHTWGFSAKDRNNHLHHAIDAVIIAYANNSIVKAFSDFKKEQESNSAELYAKKISELDYKNKRKFFEPFSGFRQKVLDKIDEIFVSKPERKKPSGALHEETFRKEEEFYQSYGGKEGVLKALELGKIRKVNGKIVKNGDMFRVDIFKHKKTNKFYAVPIYTMDFALKVLPNKAVARSKKGEIKDWILMDENYEFCFSLYKDSLILIQTKDMQEPELVYFNAFTSSTVSLIVSKHDNKFETLSKNQKILFKNANEKEVIAKSIGIQNLKVFEKYIVSALGEVTKAEFRQREDFKNELR

SEQ ID NO: 888 - protein, 983 aa, Campylobacter jejuni; identical to SEQ ID NO: 231

SEQ ID NO: 889 - protein, 987 aa, Campylobacter jejuni
MARILAFDIGISSIGWAFSENDELKDCGVRIFTKAENPKTGESLALPRRLARSARKRLARRKARLNHLKHLIANEFKLNYEDYQSFDESLAKAYKGSLISPYELRFRALNELLSKQDFARVILHIAKRRGYDDIKNSDDKEKGAILKAIKQNEEKLVNYQSVGEYLYKEYFQKFKENSKEFTNVRNKKESYERCIAQSFLKDELKLIFKKQREFGFSFSKKFEEEVLSVAFYKRALKDFSHLVGNCSFFTDEKRAPKNSPLAFMFVALTRIINLLNNLKNTEGILYTKDDLNALLNEVLKNGTLTYKQTKKLLGLSDDYEFKGEKGTYFIEFKKYKEFIKALGDHSLSQDDLNEIAKDITLIKDEIKLKKALAKYDLNQNQIDSLSKLEFKDHLNISFKALKLITPLMLEGKKYDEACNELNLKVAINEDKKDFLPAFNETYYKDEVTNPVVLRAIKEYRKVLNALLKKYGKVHKINIELAREVGKNYSQRAKIEKEQNENYKAKKDAELECEKLGLKINSKNILKLRLFKEQKEFCAYSGEKIKISDLQDEKMLEIDHIYPYSRSFDDSYMNKVLVFTKQNQEKLNQTPFEAFGNDSAKWQKIEVLAKNLPTKKQKRILDKNYKDKEQKDFKDRNLNDTRYIARLVLNYTKDYLDFLPLSDDENTKLNDTQKGSKVHVEAKSGMLTSALRHTWGFSAKDRNNHLHHAIDAVIIAYANNSIVKAFSDFKKEQESNSAELYAKKISELDYKNKRKFFEPFSGFRQKVLDKIDEIFVSKPERKKPSGALHEETFRKEEEFYQSYGGKEGVLKALELGKIRKVNGKIVKNGDMFRVDIFKHKKTNKFYAVPIYTMDFALKVLPNKAVARSEKGEIKDWILMDENYEFCFSLYKDSLILIQTKDMQEPELVYFNAFTSSTVSLIVSKHDNKFETLSKNQKILFKNANEKEVIAKSIGIQNLKVFEKYIVSALGEVTKAEFRQREDFKNELR

SEQ ID NO: 890 - protein, 987 aa, Campylobacter jejuni
MARILAFDIGISSIGWAFSENDELKDCGVRIFTKAENPKTGESLALPRRLARSARKRLARRKARLNHLKHLIANEFKLNYEDYQSFDESLAKAYKGSLISPYELRFRALNELLSKQDFARVILHIAKRRGYDNIKNSDNEEKSEILKAIKQNEEKLVNYQSVGEYLYKEYFQKFKENSKEFINVRNKKESYERCIAQSFLKDELKLIFQKQREFGLSFSKKFEEEVLSVAFYKRALKDFSHLVGNCSFFTDEKRAPKNSPLAFMFVALTRIINLLNNLKNTEGILYTKDDLNTLLNEVLKNGTLTYKQTKKLLGLSDDYEFKGEKGTYFIEFKKYKEFIKALGDHSLSQDDLNEIAKDITLIKDEIKLKKALAKYDLNQNQIDSLSKLEFKDHLNISFKALKLITPLMLEGKKYDEACNELNLKVVINEDKKDFLPAFNETYYKDEVTNPVVLRAIKEYRKVLNALLKKYGKVHKINIELAREVGKNHSQRAKIEKEQNENYKAKKDAELECEKLGLKINNKNILKLRLFKEQKEFCAYSGEKIKLSDLQDEKMLEIDHIYPYSRSFDDSYMNKVLVFTKQNQEKLNKTPFEAFGNDSTKWQKIEVLAKNLPTKKQKRILDKNYKDKEQKDFKDRNLNDTRYIARLVLNYTKDYLDFLPLSDDENTKLNDIQKGSKVHVEAKSGMLTSALRHTWGFSTKDRNNHLHHAIDAVIIAYANNSIVKAFSDFKKEQESNSAELYAKKISELDYKNKRKFFEPFSGFRQKVLDKIDEIFVSKPERKKPSGALHEETFRKEEEFYQSYGGKEGVLKALELGKIRKVNGKIVKNGDMFRVDIFKHKKTNKFYAVPIYTMDFALKVLPNKAVVQGKDKKSGLIKDWILMDENYEFCFSLYKDSLILIQTKDMQEPEFVYYNAFTSSTVSLIVSKHDNKFETLSKNQKILFKNANEKEVIAKSIGIQNLKVFEKYIVSALGEVTKAEFRQREDFKK

SEQ ID NO: 891 - protein, 984 aa, Campylobacter jejuni
MARILAFDIGISSIGWAFSENDELKDCGVRIFTKAENPKTGESLALPRRLARSARKRLARRKARLNHLKHLIANEFKLNYEDYQSFDESLAKAYKGSLISPYELRFRALNELLSKQDFARVILHIVKRRGYDDIKNSDDKEKGAILKAIKQNEEKLANYQSVGEYLYKEYFQKFKENSKEFTNVRNKKESYERCIAQSFLKDELKLIFKKQREFGFSFSKKFEEEVLSVAFYKRALKDFSHLVGNCSFFTDEKRAPKNSPLAFMFVALTRIINLLNNLKNTEGILYTKDDLNTLLNEVLKNGTLTYKQTKKLLGLSDDYEFKGEKGTYFIEFKKYKEFIKALGDHSLSQDDLNEIAKDITLIKDEIKLKKALAKYDLNQNQIDSLSKLEFKDHLNISFKALKLITPLMLEGKKYDEACNELNLKVAINEDKKDFLPAFNETYYKDEVTNPVVLRAIKEYRKVLNALLKKYGKVHKINIELAREVGKNHSQRAKIEKEQNENYKAKKDAEFECEKLGLKINSKNILKLRLFKEQKEFCAYSGEKIKISDLQDEKMLEIDHIYPYSRSFDDSYMNKVLVFTKQNQEKLNKTPFEAFGNDSAKWQKIEVLAKNLPTKKQKRILDKNYKDKEQKDFKDRNLNDTRYIARLVLNYTKDYLDFLPLSDDENTKLNDTQKGSKVHVEAKSGMLTSALRHTWGFSTKDRNNHLHHAIDAVIIAYANNSIVKAFSDFKKEQESNSAELYAKKISELDYKNKRKFFEPFSGFRQKVLDKIDEIFVSKPERKKPSGALHEETFRKEEEFYQSYGGKEGVLKALELGKIRKVNGKIVKNGDMFRVDIFKHKKTNKFYAVPIYTMDFALKVLPNKAVARSKKGEIKDWILMDENYEFCFSLYKDSLILIQTKDMQEPEFVYYNAFTSSTVSLIVSKHDNKFETLSKNQKILFKNANEKEVIAKSIGIQNLKVFEKYIVSALGEVTKAEFRQREDFKK

SEQ ID NO: 892 - protein, 984 aa, Campylobacter jejuni
MARILAFDIGISSIGWAFSENDELKDCGVRIFTKAENPKTGESLALPRRLARSARKRLARRKARLNHLKHLIANEFKLNYEDYQSFDESLAKAYKGSLISPYELRFRALNELLSKQDFARVILHIVKRRGYDDIKNSDDKEKGTILKAIKQNEEKLANYQSVGEYLYKEYFQKFKENSKEFTNVRNKKESYERCIAQSFLKDELKLIFKKQREFGFSFSKKFEEEVLSVAFYKRALKDFSHLVGNCSFFTDEKRAPKNSPLAFMFVALTRIINLLNNLKNTEGILYTKDDLNTLLNEVLKNGTLTYKQTKKLLGLSDDYEFKGEKGTYFIEFKKYKEFIKALGEHNLSQDDLNEIAKDITLIKDEIKLKKALAKYDLNQNQIDSLSKLEFKDHLNISFKALKLITPLMLEGKKYDEACNELNLKVAINEDKKDFLPAFNETYYKDEVTNPVVLRAIKEYRKVLNALLKKYGKVHKINIELAREVGKNYSQRAKIEKEQNENYKAKKDAELECEKLGLKINSKNILKLRLFKEQKEFCAYSGEKIKISDLQDEKMLEIDHIYPYSRSFDDSYMNKVLVFTKQNQEKLNQTPFEAFGNDSAKWQKIEVLAKNLPTKKQKRILDKNYKDKEQKDFKDRNLNDTRYIARLVLNYTKDYLDFLPLSDDENTKLNDTQKGSKVHVEAKSGMLTSALRHTWGFSAKDRNNHLHHAIDAVIIAYANNSIVKAFSDFKKEQESNSAELYAKKISELDYKNKRKFFEPFSGFRQKVLDKIDEIFVSKPERKKPSGALHEETFRKEEEFYQSYGGKEGVLKALELGKIRKVNGKIVKNGDMFRVDIFKHKKTNKFYAVPIYTMDFALKVLPNKAVARSKKGEIKDWILMDENYEFCFSLYKDSLILIQTKDMQEPEFVYYNAFTSSTVSLIVSKHDNKFETLSKNQKILFKNANEKEVIAKSIGIQNLKVFEKYIVSALGEVTKAEFRQREDFKK

SEQ ID NO: 893 - protein, 987 aa, Campylobacter jejuni
MARILAFDIGISSIGWAFSENDELKDCGVRIFTKAENPKTGESLALPRRLARSARKRLARRKARLNHLKHLIANEFKLNYEDYQSFNESLAKAYKGSLISPYELRFRALNELLSKQDFARVILHIAKRRGYDDIKNSDDKEKGAILKVIKQNEEKLANYQSVGEYLYKEYFQKFKENSKEFTNVRNKKESYERCIAQSFLKDELKLIFQKQREFGFSFSKKFEEEVLSVAFYKRALKDFSHLVGNCSFFTDEKRAPKNSPLAFMFVALTRIINLLNNLKNTEGILYTKDDLNALLNEVLKNGTLTYKQTKKLLGLSDDYEFKGEKGTYFIEFKKYKEFIKALGDHSLSQDDLNEIAKDITLIKDEIKLKKALAKYDLNQNQIDSLSKLEFKDHLNISFKALKLITPLMLEGKKYDEACNELNLKVAINEDKKDFLPAFNETYYKDEVTNPVVLRAIKEYRKVLNALLKKYGKVHKINIELAREVGKNYSQRAKIEKEQNENYKAKKDAELECEKLGLKINSKNILKLRLFKEQKEFCAYSGEKIKISDLQDEKMLEIDHIYPYSRSFDDSYMNKVLVFTKQNQEKLNQTPFEAFGNDSAKWQKIEVLAKNLPTKKQKRILDKNYKDKEQKDFKDRNLNDTRYIARLVLNYTKDYLDFLPLSDDENTKLNDTQKGSKVHVEAKSGMLTSALRHTWGFSAKDRNNHLHHAIDAVIIAYANNSIVKAFSDFKKEQESNSAELYAKKISELDYKNKRKFFEPFSGFRQKVLDKIDEIFVSKPERKKPSGALHEETFRKEEEFYQSYGGKEGVLKALELGKIRKVNGKIVKNGDMFRVDIFKHKKTNKFYAVPIYTMDFALKVLPNKAVARSKKGEIKDWILMDENYEFCFSLYKDSLILIQTKDMQEPELVYFNAFTSSTVSLIVSKHDNKFETLSKNQKILFKNANEKEVIAKSIGIQNLKVFEKYIVSALGEVTKAEFRQREDFKNELR

SEQ ID NO: 894 - protein, 984 aa, Campylobacter jejuni
MARILAFDIGISSIGWAFSENDELKDCGVRIFTKAENPKTGESLALPRRLARSARKRLARRKARLNRLKHLIANEFKLNYEDYQSFDESLAKAYKGSLISPYELRFRALNELLSKQDFARVILHIAKRRGYDDIKNSDDKEKGAILKAIKQNEEKLANYQSVGEYLYKEYFQKFKENSKEFTNVRNKKESYERCIAQSFLKDELKLIFKKQREFGFSFSKKFEEEVLSVAFYKRALKDFSHLVGNCSFFTDEKRAPKNSPLAFMFVALTRIINLLNNLKNTEGILYTKDDLNALLNEVLKNGTLTYKQTKKLLGLSDDYEFKGEKGTYFIEFKKYKEFIKALGDHSLNQDDLNEIAKDITLIKDEIKLKKALAKYDLNQNQIDSLSKLEFKDHLNISFKALKLITPLMLEGKKYDEACNELNLKVAINEDKKDFLPAFNETYYKDEVTNPVVLRAIKEYRKVLNALLKKYGKVHKINIELAREVGKNYSQRAKIEKEQNENYKAKKDAELECEKLGLKINSKNILKLRLFKEQKEFCVYSGEKIKISDLQDEKMLEIDHIYPYSRSFDDSYMNKVLVFTKQNQEKLNQTPFEAFGNDSAKWQKIEVLAKNLPTKKQKRILDKNYKDKEQKDFKDRNLNDTRYIARLVLNYTKDYLDFLPLSDDENTKLNDTQKGSKVYVEAKSGMLTSALRHTWGFSTKDRNNHLHHAIDAVIIAYANNSIVKAFSDFKKEQESNSAELYAKKISELDYKNKRKFFEPFSGFRQKVLDKIDEIFVSKPERKKPSGALHEETFRKEEEFYQSYGGKEGVLKALELGKIRKVNGKIVKNGDMFRVDIFKHKKTNKFYAVPIYTMDFALKVLPNKAVARSKKGEIKDWILMDENYEFCFSLYKDSLILIQTKDMQEPEFVYYNAFTSSTVSLIVSKHDNKFETLSKNQKILFKNANEKEVIAKSIGIQNLKVFEKYIVSALGEVTKAEFRQREDFKK

SEQ ID NO: 895 - protein, 984 aa, Campylobacter jejuni
MARILAFDIGISSIGWAFSENDELKDCGVRIFTKVENPKTGESLALPRRLARSARKRLARRKARLNHLKHLIANEFKLNYEDYQSFDESLAKAYKGSLISPYELRFRALNELLSKQDFARVILHIAKRRGYDDIKNSDDKEKGAILKAIKQNEEKLANYQSVGEYLYKEYFQKFKENSKEFTNVRNKKESYERCIAQSFLKDELKLIFKKQREFGFSFLKKFEEEVLSVAFYKRALKDFSHLVGNCSFFTDEKRAPKNSPLAFMFVALTRIINLLNNLKNTEGILYTKDDLNALLNEVLKNGTLTYKQTKKLLGLSDDYEFKGEKGTYFIEFKKYKEFIKALGEHNLSQDDLNEIAKDITLIKDEIKLKKALAKYDLNQNQIDSLSKLEFKDHLNISFKALKLITPLMLEGKKYDEAYNELNLKVAINEDKKDFLPAFNETYYKDEVTNPVVLRAIKEYRKVLNALLKKYGKVHKINIELAREVGKNHSQRAKIEKEQNENYKAKKDAELECEKLGLKINSKNILKLRLFKEQKEFCAYSGEKIKISDLQDEKMLEIDHIYPYSRSFDDSYMNKVLVFTKQNQEKLNQTPFEAFGNDSAKWQKIEVLAKNLPTKKQKRILDKNYKDKEQKDFKDRNLNDTRYIARLVLNYTKDYLDFLPLSDDENTKLNDTQKGSKVHVEAKSGMLTSALRHTWGFSAKDRNNHLHHAIDAVIIAYANNSIVKAFSDFKKEQESNSAELYAKKISELDYKNKRKFFEPFSGFRQKVLDKIDEIFVSKPERKKPSGALHEETFRKEEEFYQSYGGKEGVLKALELGKIRKVNGKIVKNGDMFRVDIFKHKKTNKFYAVPIYTMDFALKVLPNKAVARSKKGEIKDWILMDENYEFCFSLYKDSLILIQTKDMQEPELVYFNAFTSSTVSLIVSKHDNKFETLSKNQKILFKNANEKEVIAKSIGIQNLKVFEKYIVSALGEVTKAEFRQREDFKK

SEQ ID NO: 896 - protein, 984 aa, Campylobacter jejuni
MARILAFDIGISSIGWAFSENDELKDCGVRIFTKVENPKTGESLALPRRLARSARKRLARRKARLNHLKHLIANEFKLNYEDYQSFDESLAKAYKGSLISPYELRFRALNELLSKQDFARVILHIAKRRGYDDIKNSDDKEKGAILKAIKQNEEKLANYQSVGEYLYKEYFQKFKENSKEFTNVRNKKESYERCIAQSFLKDELKLIFKKQREFGFSFSKKFEEEVLSVAFYKRALKDFSHLVGNCSFFTDEKRAPKNSPLAFMFVALTRIINLLNNLKNTEGILYTKDDLNALLNEVLKNGTLTYKQTKKLLGLSDDYEFKGEKGTYFIEFKKYKEFIKALGEHNLSQDDLNEIAKDITLIKDEIKLKKALAKYDLNQNQIDSLSKLEFKDHLNISFKALKLITPLMLEGKKYDEACNELNLKVAINEDKKDFLPAFNETYYKDEVTNPVVLRAIKEYRKVLNALLKKYGKVHKINIELAREVGKNHSQRAKIEKEQNENYKAKKDAELECEKLGLKINSKNILKLRLFKEQKEFCAYSGEKIKISDLQDEKMLEIDHIYPYSRSFDDSYMNKVLVFTKQNQEKLNKTPFEAFGNDSAKWQKIEVLAKNLPTKKQKRILDKNYKDKEQKDFKDRNLNDTRYIARLVLNYTKDYLDFLPLSNDENTKLNDTQKGSKVHVEAKSGMLTSALRHTWGFSTKDRNNHLHHAIDAVIIAYANNSIVKAFSDFKKEQESNSAELYAKKISELDYKNKRKFFEPFSGFRQKVLDKIDEIFVSKPERKKPSGALHEETFRKEEEFYQSYGGKEGVLKALELGKIRKVNGKIVKNGDMFRVDIFKHKKTNKFYAVPIYTMDFALKVLPNKAVARSKKGEIKDWILMDENYEFCFSLYKDSLILIQTKDMQEPEFVYYNAFTSSTVSLIVSKHDNKFETLSKNQKILFKNANEKEVIAKSIGIQNLKVFEKYIVSALGEVTKAEFRQREDFKK

SEQ ID NO: 897 - protein, 984 aa, Campylobacter jejuni
MARILAFDIGISSIGWAFSENDELKDCGVRIFTKVENPKTGESLALPRRLARSARKRLARRKARLNHLKHLIANEFKLNYEDYQSFDESLAKAYKGSLISPYELRFRALNELLSKQDFARVILHIAKRRGYDDIKNSDDKEKGAILKAIKQNEEKLANYQSVGEYLYKEYFQKFKENSKEFTNVRNKKESYERCIAQSFLKDELKLIFKKQREFGFSFSKKFEEEVLSVAFYKRALKDFSHLVGNCSFFTDEKRAPKNSPLAFMFVALTRIINLLNNLKNTEGILYTKDDLNALLNEVLKNGTLTYKQTKKLLGLSDDYEFKGEKGTYFIEFKKYKEFIKALGEHNLSQDDLNEIAKDITLIKDEIKLKKALAKYDLNQNQIDSLSKLEFKDHLNISFKALKLITPLMLEGKKYDEACNELNLKVAINEDKKDFLPAFNETYYKDEVTNPVVLRAIKEYRKVLNALLKKYGKVHKINIELAREVGKNHSQRAKIEKEQNENYKAKKDAELECEKLGLKINSKNILKLRLFKEQKEFCAYSGEKIKISDLQDEKMLEIDHIYPYSRSFDDSYMNKVLVFTKQNQEKLNKTPFEAFGNDSAKWQKIEVLAKNLPTKKQKRILDKNYKDKEQKDFKDRNLNDTRYIARLVLNYTKDYLDFLPLSDDENTKLNDTQKGSKVHVEAKSGMLTSALRHTWGFSTKDRNNHLHHAIDAVIIAYANNSIVKAFSDFKKEQESNSAELYAKKISELDYKNKRKFFEPFSGFRQKVLDKIDEIFVSKPERKKPSGALHEETFRKEEEFYQSYGGKEGVLKALELGKIRKVNGKIVKNGDMFRVDIFKHKKTNKFYAVPIYTMDFALKVLPNKAVARSKKGEIKDWILMDENYEFCFSLYKDSLILIQTKDMQEPEFVYYNAFTSSTVSLIVSKHDNKFETLSKNQKILFKNANEKEVIAKSIGIQNLKVFEKYIVSALGEVTKAEFRQREDFKK

SEQ ID NO: 898 - protein, 984 aa, Campylobacter jejuni
MARILAFDIGISSIGWAFSENDELKDCGVRIFTKVENPKTGESLALPRRLARSARKRLARRKARLNHLKHLIANEFKLNYEDYQSFDESLAKAYKGSLISPYELRFRALNELLSKQDFARVILHIAKRRGYDDIKNSDDKEKGAILKAIKQNEEKLANYQSVGEYLYKEYFQKFKENSKEFTNVRNKKESYERCIAQSFLKDELKLIFKKQREFGFSFSKKFEEEVLSVAFYKRALKDFSHLVGNCSFFTDEKRAPKNSPLAFMFVTLTRIINLLNNLKNTEGILYTKDDLNALLNEVLKNGTLTYKQTKKLLGLSDDYEFKGEKGTYFIEFKKYKEFIKALGEHNLSQDDLNEIAKDITLIKDEIKLKKALAKYDLNQNQIDSLSKLEFKDHLNISFKALKLITPLMLEGKKYDEACNELNLKVAINEDKKDFLPAFNETYYKDEVTNPVVLRAIKEYRKVLNALLKKYGKVHKINIELAREVGKNHSQRAKIEKEQNENYKAKKDAELECEKLGLKINSKNILKLRLFKEQKEFCAYSGEKIKISDLQDEKMLEIDHIYPYSRSFDDSYMNKVLVFTKQNQEKLNKTPFEAFGNDSAKWQKIEVLAKNLPTKKQKRILDKNYKDKEQKDFKDRNLNDTRYIARLVLNYTKDYLDFLPLSDDENTKLNDTQKGSKVHVEAKSGMLTSALRHTWGFSTKDRNNHLHHAIDAVIIAYANNSIVKAFSDFKKEQESNSAELYAKKISELDYKNKRKFFEPFSGFRQKVLDKIDEIFVSKPERKKPSGALHEETFRKEEEFYQSYGGKEGVLKALELGKIRKVNGKIVKNGDMFRVDIFKHKKTNKFYAVPIYTMDFALKVLPNKAVARSKKGEIKDWILMDENYEFCFSLYKDSLILIQTKDMQEPEFVYYNAFTSSTVSLIVSKHDNKFETLSKNQKILFKNANEKEVIAKSIGIQNLKVFEKYIVSALGEVTKAEFRQREDFKK

SEQ ID NO: 899 - protein, 984 aa, Campylobacter jejuni
MARILAFDIGISSIGWAFSENDELKDCGVRIFTKVENPKTGESLALPRRLARSARKRLARRKARLNHLKHLIANEFKLNYEDYQSFDESLAKAYKGSLISPYELRFRALNELLSKQDFARVILHIAKRRGYDDIKNSDDKEKGAILKAIKQNEEKLANYQSVGEYLYKEYFQKFKENSKEFTNVRNKKESYERCIAQSFLKDELKLIFKKQREFGFSFSKKFEEEVLSVAFYKRALKDFSHLVGNCSFFTDEKRAPKNSPLAFMFVALTRIINLLNNLKNTEGILYTKDDLNALLNEVLKNGTLTYKQTKKLLGLSDDYEFKGEKGTYFIEFKKYKEFIKALGEHNLSQDDLNEIAKDITLIKDEIKLKKALAKYDLNQNQIDSLSKLEFKDHLNISFKALKLITPLMLEGKKYDEACNELNLKVAINEDKKDFLPAFNETYYKDEVTNPVVLRAIKEYRKVLNALLKKYGKVHKINIELAREVGKNHSQRAKIEKEQNENYKAKKDAELECEKLGLKINSKNILKLRLFKEQKEFCAYSGEKIKISDLQDEKMLEIDHIYPYSRSFDDSYMNKVLVFTKQNQEKLNKTPFEAFGNDSAKWQKIEVLAKNLPTKKQKRILDKNYKDKEQKDFKDRNLNDTRYIARLVLNYTKDYLDFLPLSDDENTKLNDTQKGSKVHVEAKSGMLTSALRHTWGFSTKDRNNHLHHAIDAVIIAYANNSIVKAFSDFKKEQESNSAELYAKKISELDYKNKRKFFEPFSGFRQKVLDKIDEIFVSKPERKKPSGALHEETFRKEEEFYQSYGGKEGVLKALELGKIRKVNGKIVKNGDMFRVDIFKHKKTNKFYAVPIYTMDFALKVLPNKAVARSKKGEIKDWILMDENYEFCFSLYKDSLILIQTKDMQEPEFVYYNAFTSSTVSLIVSKHDNKFETLSKNQKILFKNANEKEVIAKSIGIQNLKVFEKYIVSALGEVTKAEFIQREDFKK

SEQ ID NO: 900 - protein, 987 aa, Campylobacter jejuni
MARILAFDIGISSIGWAFSENDELKDCGVRIFTKVENPKTGESLALPRRLARSARKRLARRKARLNHLKHLIANEFKLNYEDYQSFDESLAKAYKGSLISPYELRFRALNELLSKQDFARVILHIAKRRGYDDIKNSDDKEKGAILKAIKQNEEKLANYQSVGEYLYKEYFQKFKENSKEFTNVRNKKESYERCIAQSFLKDELKLIFKKQREFGFSFSKKFEEEVLSVAFYKRALKDFSHLVGNCSFFTDEKRVPKNSPLAFMFVALTRIINLLNNLKNTEGILYTKDDLNALLNEVLKNGTLTYKQTKKLLGLSDDYEFKGEKGTYFIEFKKYKEFIKALGEHNLSQDDLNEIAKDITLIKDEIKLKKALAKYDLNQNQIDSLSKLEFKDHLNISFKALKLITPLMLEGKKYDEACNELNLKVAINEDKKDFLPAFNETYYKDEVTNPVVLRAIKEYRKVLNALLKKYGKVHKINIELAREVGKNHSQRAKIEKEQNENYKAKKDAELECEKLGLKINSKNILKLRLFKEQKEFCAYSGEKIKISDLQDEKMLEIDHIYPYSRSFDDSYMNKVLVFTKQNQEKLNQTPFEAFGNDSAKWQKIEVLAKNLPTKKQKRILDKNYKDKEQKNFKDRNLNDTRYIARLVLNYTKDYLDFLPLSDDENTKLNDTQKGSKVHVEAKSGMLTSALRHTWGFSAKDRNNHLHHAIDAVIIAYANNSIVKAFSDFKKEQESNSAELYAKKISELDYKNKRKFFEPFSGFRQKVLDKIDEIFVSKPERKKPSGALHEETFRKEEEFYQSYGGKEGVLKALELGKIRKVNGKIVKNGDMFRVDIFKHKKTNKFYGVPIYTMDFALKVLPNKAVARSKKGEIKDWILMDENYEFCFSLYKDSLILIQTKDMQEPEFVYYNAFTSSTVSLIVSKHDNKFETLSKNQKILFKNANEKEVIAKSIGIQNLKVFEKYIVSALGEVTKAEFRQREDFKNELR

SEQ ID NO: 901 - protein, 984 aa, Campylobacter jejuni
MARILAFDIGISSIGWAFSENDELKDCGVRIFTKVENPKTGESLALPRRLARSARKRLARRKVRLNHLKHLIANEFKLNYEDYQSFDESLAKAYKGSLISPYELRFRALNELLSKQDFARVILHIAKRRGYDDIKNSDDKEKGAILKAIKQNEEKLANYQSVGEYLYKEYFQKFKENSKEFTNVRNKKESYERCIAQSFLKDELKLIFKKQREFGFSFSKKFEEEVLSVAFYKRALKDFSHLVGNCSFFTDEKRAPKNSPLAFMFVALTRIINLLNNLKNTEGILYTKDDLNALLNEVLKNGTLTYKQTKKLLGLSDDYEFKGEKGTYFIEFKKYKEFIKALGEHNLSQDDLNEIAKDITLIKDEIKLKKALAKYDLNQNQIDSLSKLEFKDHLNISFKALKLITPLMLEGKKYDEACNELNLKVAINEDKKDFLPAFNETYYKDEVTNPVVLRAIKEYRKVLNALLKKYGKVHKINIELAREVGKNHSQRAKIEKEQNENYKAKKDAELECEKLGLKINSKNILKLRLFKEQKEFCAYSGEKIKISDLQDEKMLEIDHIYPYSRSFDDSYMNKVLVFTKQNQEKLNKTPFEAFGNDSAKWQKIEVLAKNLPTKKQKRILDKNYKDKEQKDFKDRNLNDTRYIARLVLNYTKDYLDFLPLSDDENTKLNDTQKGSKVHVEAKSGMLTSALRHTWGFSTKDRNNHLHHAIDAVIIAYANNSIVKAFSDFKKEQESNSAELYAKKISELDYKNKRKFFEPFSGFRQKVLDKIDEIFVSKPERKKPSGALHEETFRKEEEFYQSYGGKEGVLKALELGKIRKVNGKIVKNGDMFRVDIFKHKKTNKFYAVPIYTMDFALKVLPNKAVARSKKGEIKDWILMDENYEFCFSLYKDSLILIQTKDMQEPEFVYYNAFTSSTVSLIVSKHDNKFETLSKNQKILFKNANEKEVIAKSIGIQNLKVFEKYIVSALGEVTKAEFRQREDFKK

SEQ ID NO: 902 - protein, 721 aa, Campylobacter jejuni
MFVALTRIINLLNNLKNTEGILYTKDDLNTLLNEVLKNGTLTYKQTKKLLGLSDDYEFKGEKGTYFIEFKKYKEFIKALGDHSLSQDDLNEIAKDITLIKDEIKLKKALAKYDLNQNQIDSLSKLEFKDHLNISFKALKLITPLMLEGKKYDEACNELNLKVAINEDKKDFLPAFNETYYKDEVTNPVVLRAIKEYRKVLNALLKKYGKVHKINIELAREVGKNYSQRAKIEKEQNENYKAKKDAELECEKLGLKINSKNILKLRLFKEQKEFCAYSGEKIKISDLQDEKMLEIDHIYPYSRSFDDSYMNKVLVFTKQNQEKLNQTPFEAFGNDSAKWQKIEVLAKNLPTKKQKRILDKNYKDKEQKDFKDRNLNDTRYIARLVLNYTKDYLDFLPLSDDENTKLNNTQKGSKVYVEAKSGMLTSALRHTWGFSTKDRNNHLHHAIDAVIIAYANNSIVKAFSDFKKEQESNSAELYAKKISELDYKNKRKFFEPFSGFRQKVLDKIDEIFVSKPERKKPSGALHEETFRKEEEFYQSYGGKEGVLKALELGKIRKVNGKIVKNGDMFRVDIFKHKKTNKFYAVPIYTMDFALKVLPNKAVARSKKGEIKDWILMDENYEFCFSLYKDSLILIQTKDMQEPEFVYYNAFTSSTVSLIVSKHDNKFETLSKNQKILFKNANEKEVIAKSIGIQNLKVFEKYIVSALGEVTKAEFRQREDFKK

SEQ ID NO: 903 - protein, 512 aa, Campylobacter jejuni
MHKINIELAREVGKNHSQRAKIEKEQNENYKAKKDAEIECEKLGLKINSKNILKLRLFKEQKEFCAYSGEKIKLSDLQDEKMLEIDHIYPYSRSFDDSYMNKVLVFTKQNQEKLNKTPFEAFGNDSTKWQKIEVLAKNLPEKKQKRILDKNYKDKEQKDFKDRNLNDTRYIARLVLNYTKDYLDFLPLSDDENTKLNDTQKGSKVHVEAKSGMLTSALRHTWGFSAKDRNNHLHHAIDAAIIAYANNSIVKAFSDFKKEQESNSVELYAKKISELDYKNKRKFFEPFSGFRQKVLDKIDEIFVSKPERKKPSGALHEETFRKEEEFYQSYGGKEGVLKALELGKIRKVNGKIVKNGDMFRVDIFKHKKTNKFYAVPIYTMDFALKVLPNKAVARSKKGEIKDWILMDENYEFCFSLYKDSLILIQTKDMQEPELVYFNAFTSSTVSLIVSKHDNKFETLSKNQKILFKNANEKEVIAKSIGIQNLKVFEKYIVSALGEVTKAEFRQREDFKK

SEQ ID NO: 904 - protein, 965 aa, Campylobacter jejuni
MKIIGFNLGIANIGWALRENDEIIDCGVRVFDIPENPKNGNSLALERRENKARMKIVKRKKARMLATKTFLKKELNVDLSKLFLIGSTQSIYELRAKALSSLISKEELSAIILHIAKHRGYDDSALKNENGTIIEALNKNKETMLKFKSVGEYFYKNFVQNKEVKKIRNTTEDYSNSVPRSLLKQELDLILDKQKELGLIKNADFKEKLFEIIFFKRPLKDFSNKIGNCIFFENEKRAAKNTISACEFVALGKVVNLLKSIEKDIGIVYEKDSINEIMSIILDKTSISYKKIRDILNLPQEINFKGLDYSKNNVENSKLVDLKKLNEFKKALGDGFANLDKDILDSIATDITLTKDTATLKEKLKNYNVLNAEQIEKLSELVFNDHINLSLKALKQIIPLMYEGKRYDEACELCNFTIAKNQEKSEYLPLFEKTRFAKDISSPVVIRAICEFRKLLNDIIRRYGSVHKIHLELTRDFGISFSDRKKIIKEIEQNEQSRIKALETIKELKLEETSKNIQIVRLFEDQKGICPYSGLKMDLNRLDELVIDYIRPYNRSLDDSYSNKVLTFKKLSDLKQGKTPFEAFGEDEKLWAEINERIKEYNGKKRFKIFDKFFKDKKPFDFTEQTLQDTRWLTKLVASYLNEYLSFLPISEDENTALGYGEKGSKQHVILSSGMITQMLRNFWYLGFKNHKDYKNNAMDAIIVAFTTNSIIFAFNNFKKELDLAKAEFYANKISESDYLLKRKFLPPFSGFKEQALEKVKNIFVSHSLKIKNKGTLHDLTPLKIKELKNTYGDLDLAVKLGKIRKYNDKYYANANGSLVRADLFVDKKNKFHAVSIYKADFSTKKLPNKTPATTSNGETKEGIEMNENYNFCMSLYKNTPISVKIKGMKEPIICYYHGFNTSGSKITYKKHDNNYHNLSEDEMVVFRKNDKESIAVGKILEIKKYSISPSGELSLIENEERKWF

SEQ ID NO: 905 - protein, 759 aa, Campylobacter jejuni
MLSVAFYKRALKDFSHLVGNCSFFTDEKRAPKNSPLAFMFVALTRIINLLNNLKNTEGILYTKDDLNALLNEVLKNGTLTYKQTKKLLGLSDDYEFKGEKGTYFIEFKKYKEFIKALGEHNLSQDDLNEIAKDITLIKDEIKLKKALAKYDLNQNQIDSLSKLEFKDHLNISFKALKLITPLMLEGKKYDEACNELNLKVAINEDKKDFLPAFNETYYKDEVTNPVVLRAIKEYRKVLNALLKKYGKVHKINIELAREVGKNHSQRAKIEKEQNENYKAKKDAELECEKLGLKINSKNILKLRLFKEQKEFCAYSGEKIKISDLQDEKMLEIDHIYPYSRSFDDSYMNKVLVFTKQNQEKLNKTPFEAFGNDSAKWQKIEVLAKNLPTKKQKRILDKNYKDKEQKDFKDRNLNDTRYIARLVLNYTKDYLDFLPLSDDENTKLNDTQKGSKVHVEAKSGMLTSALRHTWGFSTKDRNNHLHHAIDAVIIAYANNSIVKAFSDFKKEQESNSAELYAKKISELDYKNKRKFFESFSGFRQKVLDKIDEIFVSKPERKKPSGALHEETFRKEEEFYQSYGGKEGVLKALELGKIRKVNGKIVKNGDMFRVDIFKHKKTNKFYAVPIYTMDFALKVLPNKAVARSKKGEIKDWILMDENYEFCFSLYKDSLILIQTKDMQEPEFVYYNAFTSSTVSLIVSKHDNKFETLSKNQKILFKNANEKEVIAKSIGIQNLKVFEKYIVSALGEVTKAEFRQREDFKK

SEQ ID NO: 906 - protein, 984 aa, Campylobacter jejuni
MVRILAFDIGISSIGWAFSENDELKDCGVRIFTKVENPKTGESLALPRRLARSARKRLARRKARLNHLKHLIANEFKLNYEDYQSFDESLAKAYKGSLISPYELRFRALNELLSKQDFARVILHIAKRRGYDDIKNSDDKEKGAILKAIKQNEEKLANYQSVGEYLYKEYFQKFKENSKEFTNVRNKKESYERCIAQSFLKDELKLIFKKQREFGFSFSKKFEEEVLSVAFYKRALKDFSHLVGNCSFFTDEKRAPKNSPLAFMFVALTRIINLLNNLKNTEGILYTKDDLNALLNEVLKNGTLTYKQTKKLLGLSDDYEFKGEKGTYFIEFKKYKEFIKALGEHNLSQDDLNEIAKDITLIKDEIKLKKALAKYDLNQNQIDSLSKLEFKDHLNISFKALKLITPLMLEGKKYDEACNELNLKVAINEDKKDFLPAFNETYYKDEVTNPVVLRAIKEYRKVLNALLKKYGKVHKINIELAREVGKNHSQRAKIEKEQNENYKAKKDAELECEKLGLKINSKNILKLRLFKEQKEFCAYSGEKIKISDLQDEKMLEIDHIYPYSRSFDDSYMNKVLVFTKQNQEKLNKTPFEAFGNDSAKWQKIEVLAKNLPTKKQKRILDKNYKDKEQKDFKDRNLNDTRYIARLVLNYTKDYLDFLPLSDDENTKLNDTQKGSKVHVEAKSGMLTSALRHTWGFSTKDRNNHLHHAIDAVIIAYANNSIVKAFSDFKKEQESNSAELYAKKISELDYKNKRKFFEPFSGFRQKVLDKIDEIFVSKPERKKPSGALHEETFRKEEEFYQSYGGKEGVLKALELGKIRKVNGKIVKNGDMFRVDIFKHKKTNKFYAVPIYTMDFALKVLPNKAVARSKKGEIKDWILMDENYEFCFSLYKDSLILIQTKDMQEPEFVYYNAFTSSTVSLIVSKHDNKFETLSKNQKILFKNANEKEVIAKSIGIQNLKVFEKYIVSALGEVTKAEFRQREDFKK

SEQ ID NO: 907 - protein, 1003 aa, Campylobacter lari
MRILGFDIGINSIGWAFVENDELKDCGVRIFTKAENPKNKESLALPRRNARSSRRRLKRRKARLIAIKRILAKELKLNYKDYVAADGELPKAYEGSLASVYELRYKALTQNLETKDLARVILHIAKHRGYMNKNEKKSNDAKKGKILSALKNNALKLENYQSVGEYFYKEFFQKYKKNTKNFIKIRNTKDNYNNCVLSSDLEKELKLILEKQKEFGYNYSEDFINEILKVAFFQRPLKDFSHLVGACTFFEEEKRACKNSYSAWEFVALTKIINEIKSLEKISGEIVPTQTINEVLNLILDKGSITYKKFRSCINLHESISFKSLKYDKENAENAKLIDFRKLVEFKKALGVHSLSRQELDQISTHITLIKDNVKLKTVLEKYNLSNEQINNLLEIEFNDYINLSFKALGMILPLMREGKRYDEACEIANLKPKTVDEKKDFLPAFCDSIFAHELSNPVVNRAISEYRKVLNALLKKYGKVHKIHLELARDVGLSKKAREKIEKEQKENQAVNAWALKECENIGLKASAKNILKLKLWKEQKEICIYSGNKISIEHLKDEKALEVDHIYPYSRSFDDSFINKVLVFTKENQEKLNKTPFEAFGKNIEKWSKIQTLAQNLPYKKKNKILDENFKDKQQEDFISRNLNDTRYIATLIAKYTKEYLNFLLLSENENANLKSGEKGSKIHVQTISGMLTSVLRHTWGFDKKDRNNHLHHALDAIIVAYSTNSIIKAFSDFRKNQELLKARFYAKELTSDNYKHQVKFFEPFKSFREKILSKIDEIFVSKPPRKRARRALHKDTFHSENKIIDKCSYNSKEGLQIALSCGRVRKIGTKYVENDTIVRVDIFKKQNKFYAIPIYAMDFALGILPNKIVITGKDKNNNPKQWQTIDESYEFCFSLYKNDLILLQKKNMQEPEFAYYNDFSISTSSICVEKHDNKFENLTSNQKLLFSNAKEGSVKVESLGIQNLKVFEKYIITPLGDKIKADFQPRENISLKTSKKYGLR

SEQ ID NO: 908 - protein, 372 aa, unidentified
  REGION 1..372: note = Description of Unknown: Candidate division polypeptide
DNESAINQIAYILTTQKADEGIRAELDSLPLSDKAKKAIVKIKPTNFKAFGHLSIKALQKITPHILEGMTYDKACEAAGYDFKKQSASLEQITNPVVKRAITQTLKVVRAIERKYGKPYFIKVETARDLAKNFKDRNAIKKENEENQGYNEDIKSIITNGYEASPKTKGGKQLLNHLKEFNVRLNKNADFNGQQIIKVKLYREQQGKCLYSGNPIDFETMLRDDNAYQVDHIVPFSRSNNDGITNKVLVFTEENQKKADRTPFEYFGTDERRWEKFVALVETTYKTRDVKTSDKATNAINYEYNGYAMKKKQNLLLQDYKNDSWNVRALNDTRYITRFIQNYLRQNVDFAEGEEKQRIIAPNGTTTAYLRKR

SEQ ID NO: 909 - protein, 1117 aa, Capnocytophaga ochracea
MKHILGLDLGSNSIGWAFVQQDFENKQGKIIATGSRIIPMDQGILGDFERGNTVSQTAERTTYRSMRRLRERHLLRRERLHRVLHLLGFLPPHYDAQIDFTKRYGKFIDNAEPKIAYNNGNFIFMNSFNEMVEDFKKHQPQLFYKKSNGEESRIPYDWTIYYLRKKALSQKITQQELAWLILHFNQKRGYYQLRGEEETENPNKEVAFHSLKVVDVEAEAPNKKGEIWYTIRLENGWIYRRTSKNPLDDWKGKTRDFIVTTDLNDDGTIKLDKEGKEKRSFRAPDENDWNLLKKKTEHDIDFSGKPVGTYIYDHLLQNPNQKIKGKLVRTIERKYYKDELKAILAKQIALQPELFTETLLADCIRELYRKNETQQQNLLSKDFLHLFVEDIIFYQRPLCSKKSTIANCTLEKRSYIDKETNERKDAPIKVCAKSNPYYQEFRVLQWLQNLRIYEIETDREVTAEFIETPQDYEALFNFLMSQKEIDNEGLLKYFLFAKNPQIKDKAAKSELKKWLTTYRWNYVYDAADNSSKKYPMNETGYELQRYLQKVEGLPANFLTFDITYQLWHLLYSVKDKVEFEKALKKFAKKKQLDKTSFVDSFKNFKPYPNEYGSFSEKAIKKLLPLMRFGNHWDFNRIDVSTQKRIDDLINGVANEDIRTIIREKAEKYQLNSETCFQDLPLWLAQYVVYNRHAEATDIEKWTSVSDLEAYLEDFKQHSLRNPIVEQVVTETLRVVRDIWQQYSGGQANFFDEIHIELGRELKKTAEERKQLSDKNQENENTNLRIKKLLAELKEDASIQNVRPYSLVQQELLKIYEEGVFSSTDEIEEDIQKIRKKVEPTPPEIQRYKLWLEQKYKSPYTGEVISLTKLFTEEYEIEHIIPQSRYYDDSLSNKVICESAVNKLKTNQLGLEFIQNHHGEKVRITANKEVTIFTEEQYKEFVKKHYANNSAKQQKLLLNEIPEKMVARQLNDTRYISKCISEILSKIVRSDEKDEGVNSKNIIPCTGKITTALKQDWGLNDVWNELILPRFERMNQLTQTQLFTSYNDRLQKNLPTVPIEYSQGFQKKRIDHRHHAMDALVIACATREHINYMNNQHALDKSKDKKEKQQSRIDLHPL

SEQ ID NO: 910 - protein, 303 aa, Capnocytophaga ochracea
MSFKQNLRVINKATNYYEKWEEKNGVLVKKKVKQEGTNWAIRKPLHKETVSGKIVLDRKIGKDKILTATRKAVDITFTEKIISSITDTGIQKILLNYLKYKGSPEVAFSAEGLEELNKNIAQYNDGKKHQPIYKVRIFEEGSKFPLGETGAKATKYVEAAKGTNLFFGVYQGKEKRTYATIPLNEVIERQKQGLPSVPERNEKGEPLLFSLSPNDLVYVPMEGEIAETIDFNNLSKEQKERIYKTVSFTGNQCFFVQEAVASPIVNKMEYSPLNKMERDILGIMIKEVCVKLKVDRLGNIIKA

SEQ ID NO: 911 - protein, 1471 aa, Capnocytophaga sp.
MCKYFYIKNFITFVLSKSIIPMKHILGLDLGSNSIGWAFVQQDFENKQGKIIATGSRIIPMDQGILGDFERGNTVSQTAERTTYRSTRRLRERHLLRRERLHRVLHILGFLPPHYDAQIDFTKRYGKFIDNAEPKIAYNNGNFIFMNSFNEMIEDFKKHQPQLFYKKSNGEESKIPYDWTIYYLRKKALSQKITQQELAWLILHFNQKRGYYQLRGEEETENPNKEVAFHSLKVVDVEAEAPNKKGEIWYTIRLENGWIYRRTSKIPLDDWKGKTRDFIVTTDLNDDGTIKVDKEGKEKRSFRAPDENDWNLLKKKTEHDIDFSGKTVGAYIYDHLLQNPNQKIKGKLVRTIERKYYKDELKAILAKQIALQPELFTETLLADCIRELYRKNETQQQNLLSKDFLHLFVEDIIFYQRPLRSKKSTIANCTLEKRSYIDKETNERKDAPIKVCAKSNPYYQEFRVLQWLQNLRIYEIETDREVTAEFIETPQDCEALFNFLMSQKEIDNKGLLKYFLFAKNPQIKDKAAKSELKKWLTTYRWNYVYDAADNSSKKYPMNETGYELQRYLQKVEGLPANFLTFDITYQLWHLLYSVKDKVEFEKALKKFAKKKQLDKTSFVDSFKNFKPYPNEYGSFSEKAIKKLLPLMRFGNHWDFNRIDVSTQKRIDDLINGVANEDIRTIIREKAEKYQLNSETCFQDLPLWLAQYVVYNRHAEATDIEKWTSVSDLEAYLEDFKQHSLRNPIVEQVVTETLRVVRDIWQQYGGGQANFFDEIHIELGRELKKTAEERKQLSDKNQENESTNLRIKKLLAELKEDASIQNVRPYSLVQQELLKIYEEGVFSATDEVEEDIQKIRKKAEPSKADLQRYKLWLEQKYKSPYTGEVISLTKLFTEEYEIEHIIPQSRYYDDSLSNKVICESAVNKLKTNQLGLEFIQNHHGEKVRITANKEVTIFTEEQYKEFVKKHYANNSAKQQKLLLNEIPEKMVARQLNDTRYISKYISEILSKIVRSDEKDEGVNSKNIIPCTGKITTALKQDWGLNDVWNKLILPRFERMNQLTQTQLFTSYNDRLQKNLPTVPIEYSQGFQKKRIDHRHHAMDALVIACATREHINYMNNQHALDKSKDKKEKQQSRIDLRTILCEKKNNNWQFKKPWSTFTQEAKEALEHIVVSFKQNLRVINKATNYYEKWEEKNGVLVKKKVKQEGTNWAIRKPLHKETVSGKIVLDRKIGKDKILTATRKAVDITFTEKIISSITDTGIQKILLNYLKYKGSPEVAFSTEGLEELNKNIAQYNNGKKHQPIYKVRIFEEGSKFPLGETGAKATKYVEAAKGTNLFFGVYQGKGKRTYATIPLNEVIERQKQGLPSVPERNEKGEPLLFSLSPNDLVYVPMEGEIAETIDFNNLSKEQKERIYKTVSFTGNQCFFVQEAVATPIVNKMEYSPLNKMERDILGTMIKEVCIKLKVDRLGNITKA

SEQ ID NO: 912 - protein, 1450 aa, Capnocytophaga sp.
MKHILGLDLGSNSIGWAFVQQDFENKQGKIIATGSRIIPMDQGILGDFERGNTVSQTAERTTYRNTRRLRERHLLRRERLHRVLHILGFLPPHYDSQIDFTKRYGKFIDNAEPKIAYNNGNFIFMNSFNEMIEDFKKYQPQLFYKKSNGEESKIPYDWTIYYLRKKALSQKITQQELAWLILHFNQKRGYYQLRGEEETENPNKEVAFHSLEVVDVEAEAPNKKGEIWYTIRLENGWIYRRTSKIPLDDWKGKTRDFIVTTDLNDDGTIKLDKEGKEKRSFRAPDENDWNLLKKKTEHDIDFSGKTVGAYIYDHLLQNPNQKIKGKLVRTIERKYYKDELKAILAKQIALQPELFTETLLADCIRELYRKNETQQQNLLSKDFLHLFVEDIIFYQRPLRSKKSTIANCTLEKRSYIDKETNERKDTPIKVCAKSNPYYQEFRVLQWLQNLRIYEIETDREVTAEFIETAQDNEALFNFLMSQKEIDNESLLKYFLFAKNPQIKDKVAKSELKKWLTTYRWNYVYDAADNSSKKYPMNETGYELQQYLQKVEGLPANFLTFDITYRLWHLLYSVKDKVEFEKALKKFAQEYQLDEASFVDSFKNFKPYPNEYGSFSEKAIKKLLPLMRFGNHWDFNRIDVSTQKRIDDLINGVANDEIRTIIREKAEKYQLNSETCFQGLPLWLAQYVVYNRHAEAADIEKWTSVNDLEAYLEDFKQHSLRNPIVEQVITETLRVVRDIWQRYGGGQANFFDEIHIELGRELKKTAEERKQLSNRNQENENTNLRIKKLLAELKEDASIQNVRPYSPVQQELLKIYEEGVFSATDEVEEDIQKIRKKAEPTTPEIQRYKLWLEQKYKSPYTGEVISLTKLFTEEYEIEHIIPQSRYYDDSLSNKVICESAVNKLKTNQLGLEFIQNHHGEKVRITANKEVTIFTEEQYKEFVKKHYANNSAKQQKLLLNEIPEKMVARQLNDTRYISKYISEILSKIVRSDEKDEGVNSKNIIPCTGKITTALKQDWGLNDVWNELILPRFERMNQLTQTQLFTSYNDRFQKNLPTVPIEYSQGFQKKRIDHRHHAMDALVIACATREHINYMNNQHALDKSKDKKEKQQSRIDLRTILCEKKNNNWQFKKPWSTFTQEAQEALEHIVVSFKQNLRVINKATNYYEKWEEKNGVLVKKKVKQEGTNWAIRKPLHKETVSGKIVLDRKIGKDKILTATRKSVDITFTEKIISSITDTGIQKILLNYLKYKGSPEVAFSAEGLEELNKNIAQYNDGKKHQPIYKVRIFEEGSKFPLGETGAKATKYVEAAKGTNLFFGVYQGKGKRTYATIPLNEVIERQKQGLPSVPERNEKGEPLLFSLSPNDLVYVPMEGEIAETIDFNNLSKEQKERIYKTVSFTGNQCFFVQEAVATPIVNKIEYSPLNKMERDILGTMIKEVCIKLKVDRLGNITKA

SEQ ID NO: 913 - protein, 1435 aa, Capnocytophaga sp.
MKNILGLDLGTTSIGFAHIVEDENKEKSEIKELGVRIVSLATDEQSDFEKGKSISTNANRTLKHGARLNLDRYQQRRKFLIDLLQKANLITSASILAENGKNTTHSTWQLRAKAVTERIEKEEFARVLLAINKKRGYKNSRKTKTEDEGQAIDGMAIAKCLYDENLTPGQLSLQLLQQNKKLLPDFYRSDLQKEFDLVWNLQKQFYPDILTDSFYKELQGKGKDATSKAFSKRYHFDTAENKGSKESVRLQAYQWRAEAISKQLSKEEVAYVLTEINNNLNNSSGYLGAISDRSKELYFNRQTVGQYLYAQLQENRHNSLKNKVFYRQDYLDEFERIWETQASFHKELTDELKKQIRDVVIFYQRKLKSQKGLVSFCEFESKEIEIEKDGKAITKSIGARVVPKSSPLFQEFKIWQILNNVTCKRKGIRKKKSSAKSTELDLFNEPSQSIFSLDMECKQLLFDELNLKGDLKSDKVLKLLGYSPQEWEINYNQLEGNRTQKSLYEAYLKIIEIEGYEVKDILQIKSTKDDWSLDESPLSASEIRERVKVIFQTLGICTKILYFDPLLPVKEFEQQYSYQLWHLLYSYESDDSTSGNETLYRILEKKYAFKREHATILANVALQDDYGSLSTKAIRKIYPYIKENQYSTACELAGYKHSKLSLTTEELEARELKNIIPLLKKNALRNPVVEKILNQMINVVNALIEKNSERDAEGKITKYFHFDEIRIELARELKKNAQERYEMTQNINKAKLEHQKISEKLQKQFGIKNPTKSDIIRYRLYQELEHNGYKELYTNTYIAPDVLFSKNIDIEHIVPKARVFDDSFSNKTLAFKEFNIKKGESTAFDYITSLNCEGELNQYLTRVENAYKTKSISLTKYKNLLKKASEIGDGFINRDLRDTQYIAKKAKEILFQVTKNVLSTSGSITDRLREDWGLVDVMKELNMPKYQSLGLTEVEERKDGNKVTVIKDWTKRNDHRHHAMDALTVAFTKPSYIQYLNHLNARKDENNKNYSVILAIEKKETIKVPINNGKNKRVFIEPILNFRQVAKKHLEEIFISHKAKNKVVTKNINKPAGTDKQQITLTPRGQLHKETIYGKYQYYVNKEEKVGVKFDERTITKVSNPLYREALLKRLQANDNDPKKAFAGKNALSKNPIYLDEAKTKTLPEKVNLTYLEEDFSIRKDISPDNFKDLKSIEKVIDQGVKRILIKRLQAYDNDPKKAFVDLEKNPIWLNKEKGIAIKRVTISGVSNAQPLHIGKDHLGKTTLNKEGKEVPVDYVSTGNNHHVAIYRDKEGNLQEQIVSFFEAVVRAQQGLPIIDKNYKQAEGWQFMFTMKQNEMFVFPNEATGFNPAEIDLLDPKNKKLISPNLFRVQTISIVKYGNSVVRDFKFRHHLETTLQDDKILQGITFQQIKSLEPLRNIVKVRINHLGDIVNIGEY

SEQ ID NO: 914 - protein, 1432 aa, Capnocytophaga sp.
MKNILGLDLGTTSIGFAHIVEDENKEKSEIKELGVRIVSLTTDEQSDFEKGKSITTNANRTLKHGARLNLDRYQQRRKYLIDLLHKANLITPSSILAENGKNTTHSTWQLRAKAVTERIEKEEFARILLAINKKRGYKSSRKAKTEDEGQAIDGMAIAKRLYDENLTPGQLSLQLLQQNKKLLPDFYRSDLQKEFDLVWNFQKQFYPDILTDIFYKELQGKGKDATSKAFSKRYHFDTAENKGSKESVRLQAYQWRAEAVSKQLSKEEVAYVLTEINNNLNNASGYLGAISDRSKELYFNRQTVGQYLYAQLQENRHNSLKNKVFYRQDYLDEFERIWETQALFHKELTDELKKQIRDVVIFYQRKPKSQKGLISFCEFESKEIEIEKDGKTITKNIGARVVPKSSPLFQEFKIWQILNNVICKRKGIRKKKISAKTTQLDLLNESSQTIFSLDMECKQLLFDELNLKGDLKSDKVLKLLGYSPQEWEINYNQLEGNRTQKALYEAYLKIVEMEAHDVKDILQIKSTKDDWSLDESPLSASEIRESVKAIFQALGICTKILYFDPLLPVKDFEEQDSYQLWHLLYSYESDDSTSGNETLYRILEKKYAFKREHARILANVALQDDYGSLSTKAIRKIYPNIKENQYSTACEMAGYKHSKLSLTTEELEARELKNIIPLLKKNALRNPVVEKILNQMINVVNALIEKNSERDAEGKITKYFHFDEIRIELARELKKNAQKRYEMTQNINKAKSEHQKISEILQKEFGIKNPTKSDIIRYRLYKELEHNGYKELYTNTYIAPDVLFSKNIDIEHIVPKARVFDDSFSNKTLAFKDFNIKKGESTAFDYITSLKNEEKLNQYLARVENAYKTKNISPAKYKNLLKKASEIGDGFINRDLRDTQYIAKKAKEILFQVTKNVLSTSGSITDRLREDWSLVDVMKELNMPKYQSLGLTEVEERKDGNKVTVIKDWTKRNDHRHHAMDALTVAFTKPSYIQYLNHLNARKDENNKNYSVILAIEKKETIKVPTNNGKNKRVFIEPIPNFRQVAKKHLEEIFISHKAKNKVVTKNTNKPAGTNKQQITLTPRGQLHKETIYGKYQYYVNKEEKVGVKFDKETIAKVSNPLYREALLKRLQANDNDPKKAFTGKNALSKNPIYLDEAKTKTLPEKVNLTYLEEDFSVRKKIVPKNPTSKEFVPNLKSIEKVVDEGVRNILIERLRVYNNDPEKAFVDLEKNPIWLNKEKGIAIKRVTISGVNNAQPLHIGKDHLGKTTLNKEGKEIPVDYVSTGNNHHVAIYRDKEGNLQEQIVSFFEAVVRTQQGLPIIDKTYKQEEGWQFLFTMKQNEMFVFPNEATGFNPAEIDLLDPKNKKQISPNLFRVQKIATKDYFFRHHLETNVETDNVLKNTTWKREGLSGLKDIVKVRINHLGDIVSIGEY

SEQ ID NO: 915 - protein, 1426 aa, Capnocytophaga sp.
MKNILGLDLGTTSIGFTHIVEDENKEKSEIKELGVRIVSLTTDEQSDFEKGKSISTNANRTLKHGARLNLDRYQQRRKFLIDLLQKANLITSSSILAENGKNTTHSTWQLRAKAVTERIEKEEFARVLLAINKKRGYKSSRKAKTEDEGQAIDGMAIAKRLYDENLTPGQLSLQLLQQNKKLLPDFYRSDLQKEFDLVWNFQKQFYPDILTDSFYKELQGKGKDATSKAFSKRYHFDTAENKGSRESVRLQAYQWRAEAISKQLSKEEVAYVLTEINNNLNNASGYLGAISDRSKELYFNRQTVGQYLYAQLQENKHNSLKNKVFYRQDYLDEFERIWETQASFHKELTEELKKQIRDVVIFYQRKLKSQKGLISFCEFESKEIEIEKDGKTITKSIGARVVPKSSPLFQEFKIWQILNNVTCKRKGIRKKKSSAKSTELDLFNEPSQTIFSLDMECKQLLFEELNLKGDLKSDKVLKLLGYSPQEWEINYNQLEGNRTQKALYEAYLKIVEMEAHDVKDILQIKSTKDDWALEESPLSASEIRERVKAIFQTLGICTKILYFDPLLPVKEFEEQDSYQLWHLLYSYESDDSTSGNETLYRILEKKYAFKREHATILANVTLQDDYGSLSTKAIRKIYPYIKENQYSTACEKAGYKHSKLSLTTEELEARELKNIIPLLKKNALRNPVVEKILNQMINVVNALIEKNSERDAEGKITKYFHFDEIRIELARELKKNAQERYEMTQNINKAKLEHQKISGILQKEFGIKNPTKSDITRYRLYQELAHNGYNDLYTNTYIPKELLFSKNIDIEHIVSKARVFDDSFSNKTLAFREFNIKKGESTAFDYITSLNNEEELNQYLNRVENAYKTKNISPAKYKNLLKKASEIGDGFINRDLRDTQYIAKKAKEILFQVTKNVLSTSGSITDRLREDWGLVDVMKELNMPKYQSLGLTEVEERKEGNKVTVIKNWTKRNDHRHHAMDALTVAFTKPSYIQYLNHLNARKDKNNKNYSVILAIEEKETIKVPTNNGKNKRVFIEPIPNFRQVAKKHLEEIFISHKAKNKVVTKNTNKPAGTDKQQITLTPRGQLHKETVYGKYQYYVNKEEKIGVKFDKETIAKVSNPVYREALLKRLQANDNDPKKAFAGKNALSKNPIYLDEAKTKTLTEKVNLTYLEEDFSIRKDISPDNFKDLKSIEKVIDQGVKRILIKRLQDYDNDPKKAFVDLEKNPIWLNKEKGIAIKRVTISGVNNAQPLHIGKDHLGKTTLNKEGKEIPVDYVSTGNNHHVAIYRDKEGNLQEQIVSFFEAVVGAQQGLPIVDKTYKQAEGWQFLFTMKQNEMFVFPNEATGFNPAEIDLLDPKNKKQISPNLFRVQKIATKDYFFRHHLETNVDTDNVLKNTTWKREGLSGLKDIVKVRINHLGDIVSIGEY

SEQ ID NO: 916 - protein, 1450 aa, Capnocytophaga sp.
MKRILGLDLGSNSIGWAFVEQDFENKQGKIIATGSRIIPMDQGILGDFEKGNTVSQTAERTTYRSMRRLRERHLLRRERLHRVLHILGFLPPHYDAQIDFTKRYGKFIDNAEPKIAYNNGNFIFMNSFNEMIEDFKKYQPQLFYKKSNGEESKIPYDWTIYYLRKKVLSQKITQQELAWLILHFNQKRGYYQLRGEEETENPNKEVAFHSLKVVDVEAEAPNKKGEIWYTIRLENGWIYRRTSKIPLDDWKGKTRDFIVTTDLNDDGTIKVDKEGKEKRSFRAPDENDWNLLKKKTEHDIDFSGKTVGAYIYDHLLQNPNQKIKGKLVRTIERKYYKDELKAILAKQIALQPELFTETLLADCIRELYRKNETQQQNLLSKDFLHLFVEDIIFYQRPLRSKKSTIANCTLEKRSYIDKETNERKDTFIKVCAKSNPYYQEFRVLQWLQNLRIYEIETDREVTAEFIETAEDYEALFNFLMSQKEIDNEGLLKYFLFAKNPQIKDKVAKSELKKWLTTYRWNYVYDAADNSSKKYPMNETGYDLQRYLQKVEGLPANFLTFDITYRLWHLLYSVKDKVEFEKALKKFAQEYQLDEASFVDSFKNFKPYPNEYGSFSEKAIKKLLPLMRFGNHWDFNRIDVSTQKRIDDLINGVANDEIRTIIREKAEKYQLNSESCFQGLPLWLAQYVVYNRHAEATDIEKWTSVSDLETYLEDFKQHSLRNPIVEQVVTETLRVVRDIWQQYGGGQANFFDEIHIELGRELKKTAEERKQLSNRNQENENTNLRIKKLLAELKEDASIQNVRPYSPVQQELLKIYEEGVFSSTDQVEEDIQKIRKKAEPTTPEIQRYKLWLEQKYKSPYTGEVISLTKLFTEEYEIEHIIPQSRYYDDSLSNKVICESAVNKLKTNQLGLEFIQNHHGEKVRITGNKEVTIFTEEQYKEFVKKHYANNSAKQQKLLLNEIPEKMVARQLNDTRYISKYISEILSKIVRSDEKDEGVNSKNVIPCTGKITTALKQDWGLNDVWNELILPRFERMNQLTQTQLFTSYNDRFQKNLPTVPIEYSQGFQKKRIDHRHHAMDALVIACATREHINYMNNQHALDKNKDKKEKQQSRIDLRTILCEKKNNNWQFKKPWSTFTQETKEALEHIVVSFKQNLRVINKATNYYEKWEEKNGVLVKKKVKQEGTNWAIRKPLHKETVSGKIVLDRKIGKDKILTATRKEVDITFTEKIISSITDTGIQKILLNYLNYKGSPEVAFSAEGLEELNKNIAQYNDGKKHQPIYKVRIFEEGSKFPLGETGAKATKFVEAAKGTNLFFGVYQGKEKRSYATIPLNEVIERQKQGLPSVPERNEKGEPLLFSLSPNDLVYVPMEGEIAETIDFNNLSKEQKERIYKTVSFTGNQCFFVQEAVATPIVNKMEYSPLNKMERDILGTMIKEVCIKLKVDRLGNITKA

SEQ ID NO: 917 - protein, 1437 aa, Capnocytophaga sp.
MKYIKYILGLDIGSNSIGWALIQLDLLQKTKRIIATGSRIIPMDQKVLSDFGKGITISPTAQRTSYRNARHCRERHLLRRERLHRVLHILGFLPTHYDKQIDFSKRYGKFVDNTEPKIAYNERKFLFMDSFQEMLADFKIHQPDLFYTKKNGEESKIPYDWTIYYLRKKALSRKISKEELAWIILNFNQKRGYYQLREEEEENKENDFEIISSKIISVIKKDKDKKYNKYWYDIILENGLVYQAAFYNDFVYNWINQDREFIIERISLKNGTEKVKLSYLPTFDEIDKMDKKEQDKYYKKIKIKTENSIGNKTVGCYIYDHILQNPNEKIKGKLVRTIERKYYKEELKAILEKQVALQPELFTDQLFADCIRELYSKNEAQQRNLAARDFVHLFVEDIIFYQRSLRRQKSTLANCSLESRSYIDKDSHTRKEAPLKVCPKSNPYYQEFRVLQWLQNLKIYEIDTDQEVTHEFIKTLEDKQQFFDFLMNQKEIDCEELLKYFLNQTYPNAREKALKSELKKWKDTYRWNYVYDIGEKSSKKYPMNETRYELKRHLEKVANLPDDFLSSEVEYLLWHLIYSVKDKVAYEKGLKTFAQKHHLDKDSFVESFKKFKPYPSEYGSFSEKAIRKLLPLMRFGSYWDFNHIDKNTQKRIEDLITGVENEEIRTILREKAEKYQLEKETDFQDLPLWLAQYIVYNRHAEASSLEKWTSVNDLETYLNEFKQYSLRNPIVEQVVMETLRVVRDIWQQYGQGQASFFDEIHIELGRELKKTAKEREKLSKQNQKNEDINLSIKEKLKELEKYNTRAYSITHQEKYKLWLEQKHISPYTGQIISPENLFTDNYEIEHIIPQSRFFDDSLSNKVVCESIVNKAPYKDRQLGLEFIKNQGGRIVKELSTENKTIKIFTEEQYRTFIKEHYSNNPEKTKKLLLEEIPEKMVARQMNDTCYISKFISEILSKIVRSDEQDEGVHSKNVILCTGKITSALKQDWGVNDVWNDLILPRFERMNDLTQSTLFTTYNEKYQKYLPTVPMEYSNGFQKKRIDHRHHAMDAIIIACATREHINYINNQHALEKGKDKKEKQKEHDKLREKLCIKKDNKGSEENYSWIFKKPWDTFTQEVQAALEGIVVSFKQNLRVINKATNYYERWVEENGKYIKKMVKQEGTNWAIRKPLHEETISGKIYLDREEITKNDILTATRKTVDSSFDEKRIKKITDTGIQKILLNYLKYKGSPEIAFSPEGLEELNKNLSIYNDGKPHKPIYKVRIYEKGSGRFALGEKGRKYKKYVQGAPNLYFGIYQGANKRSFATIPLNEVIERQKQGRPSIPEYNEKGDPLLFSLSPNDLVYVPVEGEIIEDIDFQNLSKEQKERIYNVNDFSSTCYFTPNRIAKAIFPKEVDLQRKGDKLPGSYDTKTASLEGIQIKEVCIKLKIDRLGNISKA

SEQ ID NO: 918 - protein, 1140 aa, Catellicoccus marimammalium
MKNMTKVNVGLDVGISSAGWSVINAETNQILESGVRLFSGSDADENVNRRNQRQGRRLFRRRKLRIQEAKKYLENVFQLKDIEPKDEWNPYEIRVRALNEKVSKEELSIALLNIVKHRGISYELEDVTDEEGTNTQSFQSGLDYNRRLLKTKTVGEIQYDRLQKYGQVRGQIQTEDGLLINIFPTKNYVEEVERILETQKKYHPEIDDVFIEKIISFVTRKREYFVGPGNEKSRTDYGIYRENGETLDNLFEILIGKDKFYPEEYRAAGSSYTAQIFNLLNDLNNLRIPTTEDHHLTKAQKEEIITELKNTSRLSGGMLKLISKVTKAPKEEISGYRKDEKDKPDLHSLAYYRKQKNMLEKEGIQIADFSEELLDELATMMTLNTEPGEIRKQLNKITNQYDILTPEVIEVLVKNHTAFVATSNHKWHRFSLKLMKEFIPELLETSKEQSTILCERGFIQNRASYLDENHHFNYAELRENLYNPVVRKSTCEMLKVFTAIQEKYPNIQNVIVELPRETNEDEQKRKIKKINDNNAKRKKEILKEAQAQSGLSEEALEEKLLKTKGLYLKLMLWYEQEGKCVYSGQEIPLSDLLQNKGGYEVDHIIPISISFDDRLCNKVLVRQQLNSQKSNQTPFEYMTTHTDGHLSFHELKELVGKNKRFSKEKRELLLAEIYSNDIETRKRFINRNLVDTSYTARIVLNALQQYKKENQLSMNVSVVRGAMTNILRKKVKLDKTRETFHHHAIDASLMAVIPNIEFFKERKEWLPKSANEEVVEVEVSEEETMPEKEFKVKMRLPESFIQDVQILQRNSFAKEEVSGPQTRERNLKIKFSHQVDQKMNRKVADDTIYGTRQAQLGKDKKEETYVIGKIKDIYNYDEYVRFKKRYDKNKESFLMYHHDPQTFEKLEEILAQYPEYIEDEKGKKKKVSPFALYREENGPVTKYAKKNNGPVIKQLKYYDSKLNRKIDISHKYSTKNRQVVLQSLKPYRTDVYRNQDTGEYTLVGIDQNDGKFVNGHYGIPKSRYEEIKANNKLSEHDEFVFSLYKNSMVKVIDENGESIVVRYLSRSMPNRKNNAEIKPVEKYQFEDGEVVPVYGKCRKQMQTVFVKKGWTLLKGNTDILGNTYFVEKESENPKKMIDDK

SEQ ID NO: 919 - protein, 1419 aa, Chryseobacterium sp.
MMIKNILGLDLGTNSIGWALIKQNFENKYGEILGMGSRIIPMSQDVLGEFGKGNSVSQTAARTGYRGVRRLRERFLLRRERLHRVLNVLNFLPEHYASQIDFEKRFGKFKYETEPKLAYNNDGFFFKNSFDEMLGDFKDHQFHLLENGRKVPYDWTIYYLRKKALSQKIEKEELAWILLNFNQKRGYYQLRGEDFEEEKDRVFVRLKVDRVVDSGENIKGKILYDVYFENGWKYEKQIVKTEDWIGRTKEFIVTESILKNGDTKRTFKAVDSEKDWIAIKTKTEQEIDKSHKTVGAYIYEALLQNPKQKIKGKLVRTIERKFYREELKKILERQKEFHPELQSDDLYNDCIRELYRNNEAHQITLSKKDFVHLLLNDLIFYQRPLRSQKSSVSNCTLEFRKYKDENGVEHAQYLKTIPKSNPYYQEFRVWQWMFNLNIYRKDDDTNVTKEFLSSTEDYETLFEFLNNRKEVDQKALLRHFKLNEKTHRWNYVEDKKYPCNETKTMISTRLEKVENYPSDFLTREMEQNIWHIIYSVNDKIEYEKALKSFAHKNNLDENSFFEAFKKFPPFKSEYGSFSEKAIKKLLPLLRLGKYWNWESIDRKSQGRIEKIITGEFDGNIKDKVREKAIHLTAENDFQGLQLWLAQYIVYGRHSEASMIGKWNSADDLEEFLKGFKQHSLRNPIVEQVITETLRVVKDIWLKYGNGAKDFFSEIHIELGREMKQTKDERVDATKRITENENTNLRIKALLAEMMNDNSVENIRPYSPMQQEILKIYEDGILKSDIEIDDDILKISKTAQPSSSDLKRYKLWLEQRYKSPYTGQIIPLNKLFTSEYEIEHIIPQSRYFDDSFSNKIICESAVNKLKDNYIGLGFIKQFGGMIVECGFGKSVEIFKAEEYEDFVKKHYANNRSKRNKLLLEEIPEKMIDRQLNDTRHISKYISGVLSNIVRQEDGTDEGVNSKNIVPGNGKITTQLKQDWGLNDVWNELILPRFERMNQLTNSTDFTSWNKNHQKFLPTVPIEFSKGFSKKRIDHRHHAMDALVIACATKDHINLLNNQSAKSDTKRYDLKRKLMKFERVVYSHSKTGEKIEKEVPKQFLKPWDNFTVDAKNKMETIIVSFKQNLRVINKATNHYEKWIEKDGIKRKELIKQEGTNWAIRKPMHKETVSGKVDLPGIKIPKGKILTATRKSLDTSFDLKTINSITDTGIQKILKNYLEFKGSSELAFSPEGIEDMNKNIEKFNDGKPHQSINKVRIFELGSKFSVGQTGNKKDKYVEAAKGTNLFFAVYEDKNGKRSYETIPLNEVIERQKQGLDSVSFKNKEDFLLCPNDLVYVPSEDELENIYNIDFKNLTTEKTGNIYKVVSFSGNQIFFIRQDIAISIVNKAEFSTLNKMERAIDGSMIKENCIKLKIDRLGNIAKI

SEQ ID NO: 920 - protein, 1065 aa, Clostridium perfringens
MNKDINYALGLDIGITSVGWAVINLDLNRIEDLGVRIFNAAENPKDGSSLALPRRLARGRRRLLRRKAYRVERVRKLIVKNNILTKEELEGLFKNKEVIDVWEARVKGLDYKLSREEWAKILINFCKRRGFKSNRKNETKDKEAGQILSSISYNIEKMKETNSRTIGEYIYNEVKNSDDSYAPLRNKFGEYKMCVSRDVLREEIHTLFEKQRELGNNFASDEIEDKYFEIFNSQRPFSNFEDLEKLVGFCTFERKKHKRAPKHCISSEEFTLYEGINKLSIIKDGEKRKLSEEERTLVVNEAFNKKEIKYTTLRKLLGLSEDELFSTLTYSIDKDISKTENTKFVSLKGYHEIKRAIEKGVSKKAWQDIENNRNLLNDIAYVLTLGKTDDEIEKQLRLRNVPEELFESLLDMSFSKFNNLSIYALEKILPFMKEGYQYNEACEKAGYNFKAIYEGVRTKKLPVIEIDEIVNPVVNRALAQTRKVINSVIDKYGSPVRINIELARDLAKNFKDRKLIEKEQKENRANLDKIRENLRELMDKEPTAVEVLKYRLWEQQRGECAYTQSQIALERLFSPGYCEIDHIIPFSRSFDDSLSNKILVLGSENQRKGNKIPYEYFGEDSERWNSFEIWVKGSYLNYKKKANLLKKKFTEEEQRDWKARNLQDTKYICRYISNFVNNRLEFKESENKQKVITVNGRATAYLRSRWGLNKVREDGDKHHALDAAVVGVTTQGMVQKISKYSKAHELYTVRKNDEFVDVETGECVDVDEYKEIRKDILPRPWRGFSEELKLRLSDNPLEELKKLPIETYNEEFIKENVKPIFVSRVPFRKISGKLFKETIYSERAFKDGYFVSKKSLVDLKRGDLDNFYNYECDKKLYDAISERMKEFNYNGKKAFESPFRKPTKSGKEGPVVRSVKIKSAAPFKDGIPMNEGLVAKEGMVRIDIYEKEGKYFVVPVYRYQLAKGIVPKRAAIAGKSELKWPIMDQTYNFKFSIFKNDLIEIKYAKKDGYFGYYDGFDRHTASLVIENHDNSDRYRGIGVKTGVVEFNKYEVDVLGNYHKVNLGGN

SEQ ID NO: 921 - protein, 1099 aa, Corynebacterium accolens
MSLSYRVGIDVGTYSLGCTAIEVDDNDQPVNILSSVSLIHDSGLDPDQQKRAVTRLASSGVARRTRRLYRRRRRRMINLEKFLTSQGWETRPFEHYSDPYLPWNARVALVNGYISDDAQRGMYLSIAFRHIANHRGWRNPYWKVSSLYSPDKPSDAFEQIRKELEESTGHKIPETVTVGQLISFAQFGKDRLRGGGKKKDEKKPQEQVNQAVISARLHQIDHAREINEICRVQKIDDALRKQILDLVFAAESPKGAQIGRVGKDPLQPKLPRALKASDAFQQYRIVALAGNLRIYRDGVSTPLDRDEKLIVFNYLINLSHKEEPSWLKVAEVLNIDRGQLHGTATMTDDGERAGAAPPVHDTNRTILGCKIKPLVHWWEGANDDERAAMLKALSNSEVEDFDSPAGAQTQAFFANLDESEQEKLDSLHLPIGRAAYSEDTLMRLTSRMLDENLDLYEARLAEFDIPKDWAPPAPRIGEPVGNPAVDRVLKGVARWLEAAADEWGAPKSVVIEHVRDGFISKSKANEIDRANNARHKRNRELFKQMQENLGIDGKLRSSDLWRYQSVQRQNCQCAYCGSPITYTTCEMDHIVPRAGEGSTNTRDNLVATCHRCNLAKKNIPFAVWAAQTNIPGVSVKEALDRTRHWSEDSGMTSKDFKKFRKNVCDRLKRTVVDEPLDARSMESVAWMANELRGRVAQRFQEENTVVNVYRGELTAEARRAAGISDKLRFIDGTGKSRLDRRHHAVDAAVVAFTQNYVAETLAIRSNKKREAQLLQAAEQWKEFTGSDAEHRAAWNAWLPKMQKLAVLLQKALDEDRIAVTSNLRLRLGNGRAHEDSIGELKTIRVGDAISVTDIDRASSEALWCALTREPDFDENNGLPENPDRRIRIHGTWYDAEDDIEVFPVGAGAIKVRGGYAELSRFHHARIYKIPGKKAPVYCMLRVYNADLIRHRHEDLFSVEIKPQTMSVRQAEPKLRKALAENTAEYLGWLVTDDELVIDTSNFNTGQIAEMQSELGQVRRWRLDGFYSPSTLRLRPLQMSAEGLREDTSIGAKKIIDRPGWLPAINKLFGEGHVTVVRRDALGRARLTSNAHLPISWKAE

SEQ ID NO: 922 - protein, 1084 aa, Corynebacterium diphtheriae
MKYHVGIDVGTFSVGLAAIEVDDAGMPIKTLSLVSHIHDSGLDPDEIKSAVTRLASSGIARRTRRLYRRKRRRLQQLDKFIQRQGWPVIELEDYSDPLYPWKVRAELAASYIADEKERGEKLSVALRHIARHRGWRNPYAKVSSLYLPDGPSDAFKAIREEIKRASGQPVPETATVGQMVTLCELGTLKLRGEGGVLSARLQQSDHAREIQEICRMQEIGQELYRKIIDVVFAAESPKGSASSRVGKDPLQPGKNRALKASDAFQRYRIAALIGNLRVWVDGEKRILSVEEKNLVFDHLVNLTPKKEPEWVTIAEILGIDRGQLIGTATMTDDGERAGARPPTHDTNRSIVNSRIAPLVDWWKTASALEQHAMVKALSNAEVDDFDSPERAKVQAFFADLDDDVHAKLDSLHLPVGRAAYSEDTLVRLTRRMLSDGVDLYTARLQEFGIEPSWTPPTPRIGEPVGNPAVDRVLKTVSRWLESATKTWGAPERVIIEHVREGFVTEKRAREMDGDMRRRAARNAKLFQEMQEKLNVQGKPSRADLWRYQSVQRQNCQCAYCGSPITFSNSEMDHIVPRAGQGSTNTRENLVAVCHRCNQSKGNTPFAIWAKNTSIEGVSVKEAVERTRHWVTDTGMRSTDFKKFTKAVVERFQRATMDEEIDARSMESVAWMANELRSRVAQHFASHGTTVRVYRGSLTAEARRASGISGKLEFLDGVGKSRLDRRHHAIDAAVIAFTSDYVAETLAVRSNLKQSQAHRQEAPQWREFTGKDAEHRATWRVWCQKMEKLSALLTEDLRDDRVVVMSNVRLRLGNGSAHEETIGKLSKVKLGSQLSVSDIDKASSEALWCALTREPDFDPKDGLPANPERHIRVNGTHVYAGDNIGLFPVSAGSIALRGGYAELGSSFHHARVYKITSGKKPAFAMLRVYTIDLLPYRNQDLFSVELKPQTMSMRQAEKKLRDALATGNAEYLGWLVVDDELVVDTSKIATDQVKAVEAELGTIRRWRVDGFFGDTRLRLRPLQMSKEGIKKESAPELSKIIDRPGWLPAVNKLFSEGNVTVVRRDSLGRVRLESTAHLPVTWKVQ

SEQ ID NO: 923 - protein, 1084 aa, Corynebacterium diphtheriae
MKYHVGIDVGTFSVGLAAIEVDDAGMPIKTLSLVSHIHDSGLDPDEIKSAVTRLASSGIARRTRRLYRRKRRRLQQLDKFIQRQGWPVIELEDYSDPLYPWKVRAELAASYIADEKERGEKLSVALRHIARHRGWRNPYAKVSSLYLPDGPSDAFKAIREEIKRASGQPVPETATVGQMVTLCELGTLKLRGEGGVLSARLQQSDHAREIQEICRMQEIGQELYRKIIDVVFAAESPKGSASSRVGKDPLQPGKNRALKASDAFQRYRIAALIGNLRVRVDGEKRILSVEEKNLVFDHLVNLAPKKEPEWVTIAEILGIDRGQLIGTATMTDDGERAGARPPTHDTNRSIVNSRIAPLVDWWKTASALEQHAMVKALSNAEVDDFDSPEGAKVQAFFADLDDDVHAKLDSLHLPVGRAAYSEDTLVRLTRRMLADGVDLYTARLQEFGIEPSWTPPAPRIGEPVGNPAVDRVLKTVSRWLESATKTWGAPERVIIEHVREGFVTEKRAREMDGDMQRRAARNAKLFQEMQEKLNVQGKPSRADLWRYQSVQRQNCQCAYCGSPITFSNSEMDHIVPRAGQGSTNTRENLVAVCHRCNQSKGNTPFAIWAKNTSIEGVSVKEAVERTRHWVTDTGMRSPDFKKFTKAVVERFQRATMDEEIDARSMESVAWMANELRSRVAQHFASHGTTVRVYRGSLTAEARRASGISGKLKFFDGVGKSRLDRRHHAIDAAVIAFTSDYVAETLAVRSNLKQSQAHRQEAPQWREFTGKDAEHRAAWRVWCQKMEKLSALLTEDLRDDRVVVMSNVRLRLGNGSAHKETIGKLSKVKLGSQLSVSDIDKASSEALWCALTREPDFDPKEGLPANPERHIRVNGTHVYAGDNIGLFPVSAGSIALRGGYAELGSSFHHARVYKITSGKKPAFAMLRVYTIDLLPYRNQDLFSVELKPQTMSMRQAEKKLRDALATGNAEYLGWLVVDDELVVDTSKIATDQVKAVEAELGTIRRWRVDGFFSPSKLRLRPLQMSKEGIKKESAPELSKIIDRPGWLPAVNKLFSDGNVTVVRRDSLGRVRLESTAHLPVTWKVQ

SEQ ID NO: 924 - protein, 1084 aa, Corynebacterium diphtheriae
MKYHVGIDVGTFSVGLAAIEVDDAGMPIKTLSLVSHIHDSGLDPDKIKSAVTRLASSGIARRTRRLYRRKRRRLQQLDKFIQRQGWPVIELEDYSDPLYPWKVRAELAASYIADEKERGEKLSVALRHIARHRGWRNPYAKVSSLYLPDEPSDAFKAIREEIKRASGQPVPETATVGQMVTLCELGTLKLRGEGGVLSARLQQSDHAREIQEICRMQEIGQELYRKIIDVVFAAESPKGSASSRVGKDPLQPGKNRALKASDAFQRYRIAALIGNLRVRVDGEKRILSVEEKNLVFDHLVNLAPKKEPEWVTIAEILGIDRGQLIGTATMTDDGERAGARPPTHDTNRSIVNSRIAPLVDWWKTASALEQHAMVKALSNAEVDDFDSPEGAKVQAFFADLDDDVHAKLDSLHLPVGRAAYSEDTLVRLTRRMLADGVDLYTARLQEFGIEPSWTPPAPRIGEPVGNPAVDRVLKTVSRWLKSATKTWGAPERVIIEHVREGFVTEKRAREMDGDMRRRAARNAKLFQEMQEKLNVQGKPSRADLWRYQSVQRQNCQCAYCGSPITFSNSEMDHIVPRAGQGSTNTRENLVAVCHRCNQSKGNTPFAIWAKNTSIEGVSVKEAVERTRHWVTDTGMRSTDFKKFTKAVVERFQRATMDEEIDARSMESVAWMANELRSRVAQHFASHGTTVRVYRGSLTAEARRASGISGKLEFLDGVGKSRLDRRHHAIDAAVIAFTSDYVAETLAVRSNLKQSQAHRQEAPQWREFTGKDAEHRAAWRVWCQKMEKLSALLTEDLRDDRVVVMSNVRLRLGNGSAHEETIGKLSKVKLGSQLSVSDIDKASSEALWCALTREPDFDPKDGLPANPERHIRVNGTHVYAGDNIGLFPVSAGSIALRGGYAELGSSFHHARVYKITSGKKPAFAMLRVYTIDLLPYRNQDLFSVELKPQTMSMRQAEKKLRDALATGNAEYLGWLVVDDELVVDTSKIATDQVKAVEAELGTIRRWRVDGFFGDTRLRLRPLQMSKEGIKKESAPELSKIIDRPGWLPAVNKLFSEGNVTVVRRDSLGRVRLESTAHLPVTWKVQ

SEQ ID NO: 925 - protein, 1084 aa, Corynebacterium diphtheriae
MKYHVGIDVGTFSVGLAAIEVDDAGMPIKTLSLVSHIHDSGLDPDKIKSAVTRLASSGIARRTRRLYRRKRRRLQQLDKFIQRQGWPVIELEDYSDPLYPWKVRAELAASYIADEKERGEKLSVALRHIARHRGWRNPYAKVSSLYLPDEPSDAFKAIREEIKRASGQPVPETATVGQMVTLCELGTLKLRGEGGVLSARLQQSDHAREIQEICRMQEIGQELYRKIIDVVFAAESPKGSASSRVGKDPLQPGKNRALKASDAFQRYRIAALIGNLRVRVDGEKRILSVEEKNLVFDHLVNLAPKKEPEWVTIAEILGIDRGQLIGTATMTDDGERAGARPPTHDTNRSIVNSRIAPLVDWWKTASALEQHAMVKALSNAEVDDFDSPEGAKVQAFFADLDDDVHAKLDSLHLPVGRAAYSEDTLVRLTRRMLADGVDLYTARLQEFGIEPSWTPPAPRIGEPVGNPAVDRVLKTVSRWLESATKTWGAPERVIIEHVREGFVTEKRAREMDGDMRRRAARNAKLFQEMQEKLNVQGKPSRADLWRYQSVQRQNCQCAYCGSPITFSNSEMDHIVPRAGQGSTNTRENLVAVCHRCNQSKGNTPFAIWAKNTSIEGVSVKEAVERTRHWVTDTGMRSTDFKKFTKAVVERFQRATMDEEIDARSMESVAWMANELRSRVAQHFASHGTTVRVYRGSLTAEARRASGISGKLEFLDGVGKSRLDRRHHAIDAAVIAFTSDYVAETLAVRSNLKQSQAHRQEAPQWREFTGKDAEHRAAWRVWCQKMEKLSALLTEDLRDDRVVVMSNVRLRLGNGSAHEETIGKLSKVKLGSQLSVSDIDKASSEALWCALTREPDFDPKDGLPANPERHIRVNGTHVYAGDNIGLFPVSAGSIALRGGYAELGSSFHHARVYKITSGKKPAFAMLRVYTIDLLPYRNQDLFSVELKPQTMSMRQAEKKLRDALATGNAEYLGWLVVDDELVVDTSKIATDQVKAVEAELGTIRRWRVDGFFGDTRLRLRPLQMSKEGIKKESAPELSKIIDRPGWLPAVNKLFSEGNVTVVRRDSLGRVRLESTAHLPVTWKVQ

SEQ ID NO: 926 - protein, 1084 aa, Corynebacterium diphtheriae
MKYHVGIDVGTFSVGLAAIEVDDAGMPIKTLSLVSHIHDSGLDPDKMKSAVTRLASSGIARRTRRLYRRKRRRLQQLDKFIQRQGWPVIELEDYSDPLYPWKVRAELAASYIADEKERGEKLSVALRHIARHRGWRNPYAKVSSLYLPDEPSDAFKSIREEIKRASGQPVPETATVGQMVTLCELGTLKLRGEGGVLSARLQQSDHAREIQEICRMQEIGQELYRKIIDVVFAAESPKGSASSRVGKDPLQPGKNRALKASDSFQRYRIAALISNLRVRVDGEKRILSVEEKNLVFDHLVNLAPKKEPEWVTIAEILGIDRGQLIGTATMTDDGERAGARPPTHDTNRSIVNSRIAPLVDWWKTASALEQHAMVKALSNAEVDDFDSPEGAKVQAFFADLDDDVHAKLDSLHLPVGRAAYSEDTLVRLTRRMLADGVDLYTARLQEFGIEPSWTPPAPRIGEPVGNPAVDRVLKTVSRWLESATKTWGAPERVIIEHVRDGFVTEKRAREMDGDMRRRAARNAKLFQEMQEKLNVQGKPSRADLWRYQSVQRQNCQCAYCGSPITFSNSEMDHIVPRAGQGSTNTRENLVAVCHRCNQSKGNTPFAIWAKNTSIEGVSVKEAVERTRHWVTDTGMRSTDFKKFTKAVVERFQRATMDEEIDARSMESVAWMANELRSRVAQHFASHGTTVRVYRGSLTAEARRASGISGKLEFLDGVGKSRLDRRHHAIDAAVIAFTSDYVAETLAVRSNLKQSQAHRQEAPQWREFTGKDAEHRAAWRVWCQKMEKLSALLTEDLRDDRVVVMSNVRLRLGNGSAHEETIGKLSKVKLGSQLSVSDIDKASSEALWCALTREPDFDPKDGLPANPERHIRVNGTHVYAGDNIGLFPVSAGSIALRGGYAELGSSFHHARVYKITSGKKPAFAMLRVYTIDLLPYRNQDLFSVELKPQTMSMRQAEKKLRDALATGNAEYLGWLVVDDELVVDTSKIATDQVKAVEAELGTIRRWRVDGFFGDTRLRLRPLQMSKEGIKKELAPELSKIIDRPGWLPAVNKLFSEGNVTVVRRDSLGRVRLESTAHLPVTWKVQ

SEQ ID NO: 927 - protein, 1084 aa, Corynebacterium diphtheriae
MKYHVGIDVGTFSVGLAAIEVDDAGMPIKTLSLVSHIHDSGLDPDKMKSAVTRLASSGIARRTRRLYRRKRRRLQQLDKFIQRQGWPVIELEDYSDPLYPWKVRAELAASYIADEKERGEKLSVALRHIARHRGWRNPYAKVSSLYLPDEPSDAFKSIREEIKRASGQPVPETATVGQMVTLCELGTLKLRGEGGVLSARLQQSDHAREIQEICRMQEIGQELYRKIIDVVFAAESPKGSASSRVGKDPLQPGKNRALKASDAFQRYRIAALIGNLRVRVDGEKRILSVEEKNLVFDHLVNLAPKKEPEWVTIAEILGIDRGQLIGTATMTDDGERAGARPPTHDTNRSIVNSRIAPLVDWWKTASALEQHAMVKALSNAEVDDFDSPEGAKVQAFFADLDDDVHAKLDSLHLPVGRAAYSEDTLVRLTRRMLADGVDLYTARLQEFGIEPSWTPPAPRIGEPVGNPAVDRVLKTVSRWLESATKTWGAPERVIIEHVREGFVTEKRAREMDGDMRRRAARNAKLFQEMQEKLNVQGKPSRADLWRYQSVQRQNCQCAYCGSPITFSNSEMDHIVPRAGQGSTNTRENLVAVCHRCNQSKGNTPFAIWAKNTSIEGVSVKEAVERTRHWVTDTGMRSTDFKKFTKAVVERFQRATMDEEIDARSMESVAWMANELRSRVAQHFASHGTTVRVYRGSLTAEARRASGISGKLEFLDGVGKSRLDRRHHAIDAAVIAFTSDYVAETLAVRSNLKQSQAHRQEAPQWREFTGKDAEHRAAWRVWCQKMEKLSALLTEDLRDDRVVVMSNVRLRLGNGSAHEETIGKLSKVKLGSQLSVSDIDKASSEALWCALTREPDFDPKDGLPANPERHIRVNGTHVYAGDNIGLFPVSAGSIALRGGYAELGSSFHHARVYKITSGKKPAFAMLRVYTIDLLPYRNQDLFSVELKPQTMSMRQAEKKLRDALATGNAEYLGWLVVDDELVVDTSKIATDQVKAVEAELGTIRRWRVDGFFGDTRLRLRPLQMSKEGIKKESAPELSKIIDRPGWLPAVNKLFSEGNVTVVRRDSLGRVRLESTAHLPVTWKVQ

SEQ ID NO: 928 - protein, 1084 aa, Corynebacterium diphtheriae
MKYHVGIDVGTFSVGLAAIEVDDAGMPIKTLSLVSHIHDSRLDPDKIKSAVTRLASSGIARRTRRLYRRKRRRLQQLDKFIQRQGWPVIELEDYSDPLYPWKVRAELAASYIADEKERGEKLSVALRHIARHRGWRNPYAKVSSLYLPDEPSDAFKAIREEIKRASGQPVPETATVGQMVTLCELGTLKLRGEGGVLSARLQQSDHAREIQEICRMQEIGQELYRKIIDVVFAAESPKGSASSRVGKDPLQPGKNRALKASDAFQRYRIAALIGNLRVRVDGEKRILSVEEKNLVFDHLVNLAPKKEPEWVTIAEILGIDRGQLIGTATMTDDGERAGARPPTHDTNRSIVNSRIAPLVDWWKTASALEQHAMVKALSNAEVDDFDSPEGAKVQAFFADLDDDVHAKLDSLHLPVGRAAYSEDTLVRLTRRMLADGVDLYTARLQEFGIEPSWTPPAPRIGEPVGNPAVDRVLKTVSRWLESATKTWGAPERVIIEHVREGFVTEKRAREMDGDMRRRAARNAKLFQEMQEKLNIQGKPSRADLWRYQSVQRQNCQCAYCGSPITFSNSEMDHIVPRAGQGSTNTRENLVAVCHRCNQSKGNTPFAIWAKNTSIEGVSVKEAVERTRHWVTDTGMRSTDFKKFTKAVVERFQRVTMDEEIDARSMESVAWMANELRSRVAQHFASRGTTVRVYRGSLTAEARRASGISGKLEFLDGVGKSRLDRRHHAIDAAVIAFTSDYVAETLAVRSNLKQSQAHRQEAPQWREFTGKDAEHRAAWRVWCQKMEKLSALLTEDLRDDRVVVMSNVRLRLGNGSAHEETIGKLSKVKLGSQLSVSDIDKASSEALWCALTREPDFDPKDGLPANPERHIRVNGTHVYAGDNIGLFPVSAGSIALRGGYAELGSSFHHARVYKITSGKKPAFAMLRVYTIDLLPYRNQDLFSVELKPQTMSMRQAEKKLRDALATGNAEYLGWLVVDDELVVDTSKIATDQVKAVEAELGTIRRWRVDGFFGDTRLRLRPLQMSKEGIKKESAPELSKIIDRPGWLPAVNKLFSEGNVTVVRRDSLGRVRLESTAHLPVTWKVQ

SEQ ID NO: 929 - protein, 1069 aa, Corynebacterium matruchotii
MAAIAIDDDGKPTEILSAISLIHDSGVDPDSAKSAATRLATSGIARRTRRLYRRKRKRLAKLDKFISSQGWPLKEFEKYEDPFYPWRVRAELATTAITDQQELGEKLSIALRHIARHRGWRNPYSKVTALYTVTEPSDAFLAMQEECAKQLGRTIPETITVGQLVTGMNLGKTRLRGENSLLAARPRQSDNANEIHTIAKVQGLSNELVRQIIDHVFAAESPKGSAAEQVGKDPLQPTKKRALKASDAFQQYRIAALIGNLRIRGGKGNRRLTTEETRLVFDYLRSLPAKQEPTWQLVAEQLKIDRGNLVGTAIMTDDGERAGAKPPVHDTNRIMENTKIKPLATWWKSADADARAAMVKALSNAEVDDFDSQAGAQVQEFFFGISDEDQEKLDGLHLPIGRAAYSEDTLDRLTKRMIGEGMDLYEARQAEFKISNDWAPPAPEIGERVGNPAVDRVLKATARWLNAAERQWGAPKSVNIEHVRAAFMSESSARELDRDNQQRAKRNVKVVAEMQEKLGIEGRPSRADVWRFQSIQRQNGKCAYCGAEISFKNSEMDHIIPQVGEGSTNTRDNLVAVCRECNSSKSNIAFAVWAENTSRPGVSVQKAIERTHHWVTDSGLRKPEFDKFRKQVCDRLRRKATDEPIDARSLESVAWMANELRSRIAQKFKDGDTKVRVYKGALTAEARRASGISGKLEFVDGKGKSRLDRRHHAVDAAVVAFTSNYVAETLALRSNMKFDQELRRKAPQWREFTGSDHVHQVEWTKWKYRMQALAELLNNALVQDRIVVMHNLRLRLGNGAAHEDTIGKLTRLKVGDAISTTDIDRASSEALWCALTRDPDYDPKTGLPENPNRTIRIHGTHLTASDEITVFPVAAASIPIRDGFAKLGSNYHHVRLFRVPSGKKYKYCLMQVYTVDLLKFRKEDLFTVELKPQTISVRTCEALLRKALANGTAEYLGWLVSDDELLIDTSSFDTPGIVKLREEYGPVNRWRLAGLTSVTRLNLRPLYLSKEGLKPNVNPEIKKIIDNRSWIITVNKLFSSGHVKIIRRDALGRPRLHSAAHLPICWEVK

SEQ ID NO: 930 - protein, 210 aa, Diplosphaera colitermitum
MSDILDKPIVLSLNRAWQVIGHRTVKQALVALNGGNADLPPALGLDIAYPKFDDGAWNFDRPLFLNPLPWSEWIELPVRDFDFAITTPRLRIRVPTVIVATQFAKMPVRIPRLTREAIFERDGGVCQYTGEHVGKHGGNLDHVVPRDRGGRDSFENLVWAKREINSLKANRLPHEAGLRLLRRPKAPAPLPASMTIREARHPDWRHFLTP

SEQ ID NO: 931 - protein, 1332 aa, Dolosigranulum pigrum
MQKNYTIGLDIGTNSVGWAVMKDDYTLIRKRMKVLGNTDIKKIKKNFWGVRLFDEGETAKETRLKRGTRRRYQRRRNRLIYLQDIFQQPMLAIDENFFHRLDDSFFVPDDKSYDRHPIFGSLEEEVAYHNTYPTIYHLRKHLADNPEKADLRLVYTALAHIVKYRGHFLIEGELNTENTSISETFEQFLDTYSDIFKEQLVGDISKVEEILSSKQSRSRKHEQIMALFPNENKLGNFGRFMMLIVGNTSNFKPVFDLDDEYKLKLSDETYEEDLDTLLGMTDDVFLDVFMAAKNVYDAVEMSAIISTDTGNSKAVLSNQMINFYDEHKVDLAQLKQFFKTHLPDKYYECFSDPSKNGYAGYIDGKTNQEDFYKYIEKVMKTIKSDKKDYFLDKIDREVFLRKQRSFYNSVIPHQIHLQEMQAILDRQSQYYPFLAENRDKIESLVTFRIPYYVGPLTVSDQSEFAWMERQSDEPIRPWNFDEIVNKERSAEKFIERMTNMDTYLLEEKVLPKRSLLYQTFEVYNELTKVRYTNEQGKTEKLNRQQKAEIIETLFKQKNRVREKDIANYLEQYGYVDGTDIKGVEDKFNASLSTYNDLAKIDGAKAYLDDPEYADVWEDIIKILTIFEDKAMRKKQLQTYSDTLSPEILKKLERKHYTGWGRFSKKLINGLRDEGSNKTILDYLKSDEGSSGPTNRNFMQLIRDNTLSFKKKIEDAQTIEDTTHIYDTVAELPGSPAIKKGIRQALKIVEEIIDIIGYEPENIVVEMARESQTTKKGKDLSKERLEKLTEAIKEFDGPSDVKVKDLKNENLRNDRLYLYYLQNGRDMYTNEPLDINNLSKYDIDHIIPQSFTTDNSIDNKVLVSRTKNQGNKSDDVPSINIVHKMKPFWRQLHKAGLISDRKFKNLTKAEHGGLTEADRAHFLNRQLVETRQITKHVANLLDSQYNTAEEQRINIVLLKSSMTSRFRKEFKLYKVREINDYHHGHDAYLNAVVATTIMKVYPNLKPQFVYGQYKKTSMFKEEKATARKHFYSNITKFFKKEKVVNEETGEILWDTERHLSTIKRVLSWKQMNIVKKVEKQKGQLWKETIYPKGDSSKLIPVKEGMDPQKYGGLSQVSEAFAVVITHEKGKKKQLKSDLISIPIVDQKAYEQHPTAYLEEAGYNNPTVLHELFKYQLFELEDGSRRMIASAKEFQKGNQMVLPLELVELLYHANRYDKVKFPDSIEYVHDNLAKFDDLLEYVIDFSNKYINADKNVQKIQKIYKEHGTEDVELTVESFVNLMTFTAMGAPATFKFYGESITRSRYTSITEFRGSTLIFQSITGLYETRYKLEDN

SEQ ID NO: 932 - protein, 921 aa, Enterococcus faecalis
MIPHQIHLAELQAIIHRQAAYYPFLKENQEKIEQLVTFRIPYYVGPLSKGDASTFAWLKRQSEEPIRPWNLQETVDLDQSATAFIERMTNFDTYLPSEKVLPKHSLLYEKFMVFNELTKISYTDDRGIKANFSGKEKEKIFDYLFKTRRKVKKKDIIQFYRNEYNTEIVTLSGLEEDQFNASFSTYQDLLKCGLTRAELDHPDNAEKLEDIIKILTIFEDRQRIRTQLSTFKGQFSAEVLKKLERKHYTGWGRLSKKLINGIYDKESGKTILGYLIKDDGVSKHYNRNFMQLINDSQLSFKNAIQKAQSSEHEETLSETVNELAGSPAIKKGIYQSLKIVDELVAIMGYAPKRIVVEMARENQTTSTGKRRSIQRLKIVEKAMAEIGSNLLKEQPTTNEQLRDTRLFLYYMQNGKDMYTGDELSLHRLSHYDIDHIIPQSFMKDDSLDNLVLVGSTENRGKSDDVPSKEVVKDMKAYWEKLYAAGLISQRKFQRLTKGEQGGLTLEDKAHFIQRQLVETRQITKNVAGILDQRYNANSKEKKVQIITLKASLTSQFRSIFGLYKVREVNDYHHGQDAYLNCVVATTLLKVYPNLAPEFVYGEYPKFQTFKENKATAKAIIYTNLLRFFTEDEPRFTKDGEILWSNSYLKTIKKELNYHQMNIVKKVEVQKGGFSKESIKPKGPSNKLIPVKNGLDPQKYGGFDSPIVAYTVLFTHEKGKKPLIKQEILGITIMEKTRFEQNRILFLEEKGFLRPRVLMKLPKYTLYEFPEGRRRLLASAKEAQKGNQMVLPEHLLTLLYHAKQCLLPNQSESLTYVEQHQPEFQEILERVVDFAEVHTLAKSKVQQIVKLFEANQTADVKEIAASFIQLMQFNAMGAPSTFKFFQKDIERARYTSIKEIFDATIIYQSTTGLYETRRKVVD

SEQ ID NO: 933 - protein, 1337 aa, Enterococcus faecalis; identical to SEQ ID NO: 110

SEQ ID NO: 934 - protein, 1337 aa, Enterococcus faecalis
MKKDYVIGLDIGTNSVGWAVMTEDYQLVKKKMPIYGNTEKKKIKKNFWGVRLFEEGHTAEDRRLKRTARRRISRRRNRLRYLQAFFEEAMTALDENFFARLQESFLVPEDKKWHRHPIFAKLEDEVAYHETYPTIYHLRKKLADSSEQADLRLIYLALAHIVKYRGHFLIEGKLSTENISVKEQFQQFMIIYNQTFVNGESRLVSAPLPESVLIEEELTEKASRTKKSEKVLQQFPQEKANGLFGQFLKLMVGNKADFKKVFGLEEEAKITYASESYEEDLEGILAKVGDEYSDVFLAAKNVYDAVELSTILADSDKKSHAKLSSSMIVRFTEHQEDLKNFKRFIRENCPDEYDNLFKNEQKDGYAGYITHAGKVSQLKFYQYVKKIIQDIAGAEYFLEKIAQENFLRKQRTFDNGVIPHQIHLAELQAIIHRQAAYYPFLKENQEKIEQLVTFRIPYYVGPLSKGDANTFAWLKRQSEEPIRPWNLQETVDLDQSATAFIERMTNFDTYLPSEKVLPKHSLLYEKFMVFNELTKISYTDDRGIKANFSGKEKEKIFDYLFKTRRKVKKKDIIQFYRNEYNTEIVTLSGLEEDQFNASFSTYQDLLKCGLTRAELDHPDNAEKLEDIIKILTIFEDRQRIRTQLSTFKGQFSAEVLKKLERKHYTGWGRLSKKLINGIYDKESGKTILDYLIKDDGVSKHYNRNFMQLINDSQLSFKNAIQKAQSSEHEETLSETVNELAGSPAIKKGIYQSLKIVDELVAIMGYAPKRIVVEMARENQTTSTGKRRSIQRLKIVEKAMAEIGSNLLKEQPTTNEQLRDTRLFLYYMQNGKDMYTGDELSLHRLSHYDIDHIIPQSFMKDDSLDNLVLVGSTENRGKSDDVPSKEVVKDMKAYWEKLYAAGLISQRKFQRLTKGEQGGLTLEDKAHFIQRQLVETRQITKNVAGILDQRYNAKSKEKKVQIITLKASLTSQFRSIFGLYKVREVNDYHHGQDAYLNCVVATTLLKVYPNLAPEFVYGEYPKFQTFKENKATAKAIIYTNLLRFFTEDEPRFTKDGEILWSNSYLKTIKKELNYHQMNIVKKVEVQKGGFSKESIKPKGPSNKLIPVKNGLDPQKYGGFDSPIVAYTVLFTHEKGKKPLIKQEILGITIMEKTRFEQNPILFLEEKGFLRPRVLMKLPKYTLYQFPEGRRRLLASAKEAQKGNQMVLPEHLLTLLYHAKQCLLPNQSESLAYVEQHQPEFQEILERVVDFAEVHTLAKSKVQQIVKLFEANQTADVKEIAASFIQLMQFNAMGAPSTFKFFQKDIERARYTSIKEIFDATIIYQSTTGLYETRRKVVD

SEQ ID NO: 935 - protein, 1337 aa, Enterococcus faecalis
MKKDYVIGLDIGTNSVGWAVMTEDYQLVKKKMPIYGNTEKKKIKKNFWGVRLFEEGHTAEDRRLKRTARRRISRRRNRLRYLQAFFEEAMTALDENFFARLQESFLVPEDKKWHRHPIFAKLEDEVAYHETYPTIYHLRKKLADSSEQADLRLIYLALAHIVKYRGHFLIEGKLSTENISVKEQFQQFMIIYNQTFVNGESRLVSTPLPESVLIEEELTEKASRTKKSEKVLQQFPQEKANGLFGQFLKLMVGNKADFKKVFGLEEEAKITYASESYEEDLEGILAKVGDEYSDVFLAAKNVYDAVELSTILADSDKKSHAKLSSSMIVRFTEHQEDLKNFKRFIRENCPDEYDNLFKNEQKDGYAGYITHAGKVSQLKFYQYVKKIIQDIAGAEYFLEKIAQENFLRKQRTFDNGVIPHQIHLAELQAIIHRQAAYYPFLKENQEKIEQLVTFRIPYYVGPLSKGDASTFAWLKRQSEEPIRPWNLQETVDLDQSATAFIERMTNFDTYLPSEKVLPKHSLLYEKFMVFNELTKISYTDDRGIKANFSGKEKEKIFDYLFKTRRKVKKKDIIQFYRNEYNTEIVTLSGLEEDQFNASFSTYQDLLKCGLTRAELDHPDNAEKLEDIIKILTIFEDRQRIRTQLSTFKGQFSAEVLKKLERKHYTGWGRLSKKLINGIYDKESGKTILDYLVKDDGVSKHYNRNFMQLINDSQLSFKNAIQKAQSSEHEETLSETVNELAGSPAIKKGIYQSLKIVDELVAIMGYAPKRIVVEMARENQTTSTGKRRSIQRLKIVEKAMAEIGSNLLKEQPTTNEQLRDTRLFLYYMQNGKDMYTGDELSLHRLSHYDIDHIIPQSFMKDDSLDNLVLVGSTENRGKSDDVPSKEVVKDMKAYWEKLYAAGLISQRKFQRLTKGEQGGLTLEDKAHFIQRQLVETRQITKNVAGILDQRYNAKSKEKKVQIITLKASLTSQFRSIFGLYKVREVNDYHHGQDAYLNCVVATTLLKVYPNLAPEFVYGEYPKFQTFKENKATAKAIIYTNLLRFFTEDEPRFTKDGEILWSNSYLKTIKKELNYHQMNIVKKVEVQKGGFSKESIKPKGPSNKLIPVKNGLDPQKYGGFDSPIVAYTVLFTHEKGKKPLIKQEILGITIMEKTRFEQNPILFLEEKGFLRPRVLMKLPKYTLYEFPEGRRRLLASAKEAQKGNQMVLPEHLLTLLYHAKQCLLPNQSESLAYVEQHQPEFQEILERVVDFAEVHTLAKSKVQQIVKLFEANQTADVKEIAASFIQLMQFNAMGAPSTFKFFQKDIERARYTSIKEIFDATIIYQSTTGLYETRRKVVD

SEQ ID NO: 936 - protein, 1337 aa, Enterococcus faecalis
MKKDYVIGLDIGTNSVGWAVMTEDYQLVKKKMPIYGNTEKKKIKKNFWGVRLFEEGHTAEDRRLKRTARRRISRRRNRLRYLQAFFEEAMTDLDENFFARLQESFLVPEDKKWHRHPIFAKLEDEVAYHETYPTIYHLRKKLADSSEQADLRLIYLALAHIVKYRGHFLIEGKLSTENISVKEQFQQFMIIYNQTFVNGESRLVSAPLPESVLIEEELTEKASRTKKSEKVLQQFPQEKANGLFGQFLKLMVGNKADFKKVFGLEEEAKITYASESYEEDLEGILAKVGDEYSDVFLAAKNVYDAVELSTILADSDKKSHAKLSSSMIVRFTEHQEDLKKFKRFIRENCPDEYDNLFKNEQKDGYAGYIAHAGKVSQLKFYQYVKKIIQDIAGAEYFLEKIAQENFLRKQRTFDNGVIPHQIHLAELQAIIHRQAAYYPFLKENQEKIEQLVTFRIPYYVGPLSKGDASTFAWLKRQSEEPIRPWNLQETVDLDQSATAFIERMTNFDTYLPSEKVLPKHSLLYEKFMVFNELTKISYTDDRGIKANFSGKEKEKIFDYLFKTRRKVKKKDIIQFYRNEYNTEIVTLSGLEEDQFNASFSTYQDLLKCGLTRAELDHPDNAEKLEDIIKILTIFEDRQRIRTQLSTFKGQFSAEVLKKLERKHYTGWGRLSKKLINGIYDKESGKTILGYLIKDDGVSKHYNRNFMQLINDSQLSFKNAIQKAQSSEHEETLSETVNELAGSPAIKKGIYQSLKIVDELVAIMGYAPKRIVVEMARENQTTSTGKRRSIQRLKIVEKAMAEIGSNLLKEQPTTNEQLRDTRLFLYYMQNGKDMYTGDELSLHRLSHYDIDHIIPQSFMKDDSLDNLVLVGSTENRGKSDDVPSKEVVKDMKAYWEKLYAAGLISQRKFQRLTKGEQGGLTLEDKAHFIQRQLVETRQITKNVAGILDQRYNANSKEKKVQIITLKASLTSQFRSIFGLYKVREVNDYHHGQDAYLNCVVATTLLKVYPNLAPEFVYGEYPKFQTFKENKATAKAIIYTNLLRFFTEDEPRFTKDGEILWSNSYLKTIKKELNYHQMNIVKKVEVQKGGFSKESIKPKGPSNKLIPVKNGLDPQKYGGFDSPIVAYTVLFTHEKGKKPLIKQEILGITIMEKTRFEQNPILFLEEKGFLRPRVLMKLPKYTLYEFPEGRRRLLASAKEAQKGNQMVLPEHLLTLLYHAKQCLLPNQSESLAYVEQHQPEFQEILERVVDFAEVHTLAKSKVQQIVKLFEANQTADVKEIAASFIQLMQFNAMGAPSTFKFFQKDIERARYTSIKEIFDATIIYQSTTGLYETRRKVVD

SEQ ID NO: 937 - protein, 936 aa, Enterococcus faecalis
MKKDYVIGLDIGTNSVGWAVMTEDYQLVKKKMPIYGNTEKKKIKKNFWGVRLFEEGHTAEDRRLKRTARRRISRRRNRLRYLQAFFEEAMTDLDENFFARLQESFLVPEDKKWHRHPIFAKLEDEVAYHETYPTIYHLRKKLADSSEQADLRLIYLALAHIVKYRGHFLIEGKLSTENISVKEQFQQFMIIYNQTFVNGESRLVSAPLPESVLIEEELTEKASRTKKSEKVLQQFPQEKANGLFGQFLKLMVGNKADFKKVFGLEEEAKITYASESYEEDLEGILAKVGDEYSDVFLAAKNVYDAVELSTILADSDKKSHAKLSSSMIVRFTEHQEDLKKFKRFIRENCPDEYDNLFKNEQKDGYAGYIAHAGKVSQLKFYQYVKKIIQDIAGAEYFLEKIAQENFLRKQRTFDNGVIPHQIHLAELQAIIHRQAAYYPFLKENQEKIEQLVTFRIPYYVGPLSKGDASTFAWLKRQSEEPIRPWNLQETVDLDQSATAFIERMTNFDTYLPSEKVLPKHSLLYEKFMVFNELTKISYTDDRGIKANFSGKEKEKIFDYLFKTRRKVKKKDIIQFYRNEYNTEIVTLSGLEEDQFNASFSTYQDLLKCGLTRAELDHPDNAEKLEDIIKILTIFEDRQRIRTQLSTFKGQFSAEVLKKLERKHYTGWGRLSKKLINGIYDKESGKTILGYLIKDDGVSKHYNRNFMQLINDSQLSFKNAIQKAQSSEHEETLSETVNELAGSPAIKKGIYQSLKIVDELVAIMGYAPKRIVVEMARENQTTSTGKRRSIQRLKIVEKAMAEIGSNLLKEQPTTNEQLRDTRLFLYYMQNGKDMYTGDELSLHRLSHYDIDHIIPQSFMKDDSLDNLVLVGSTENRGKSDDVPSKEVVKDMKAYWEKLYAAGLISQRKFQRLTKGEQGGLTLEDKAHFIQRQLVETR

SEQ ID NO: 938 - protein, 1337 aa, Enterococcus faecalis
MKKDYVIGLDIGTNSVGWAVMTEDYQLVKKKMPIYGNTEKKKIKKNFWGVRLFEEGHTAEDRRLKRTARRRISRRRNRLRYLQAFFEEAMTDLDENFFARLQESFLVPEDKKWHRHPIFAKLEDEVAYHETYPTIYHLRKKLADSSEQADLRLIYLALAHIVKYRGHFLIEGKLSTENISVKEQFQQFMIIYNQTFVNGESRLVSAPLPESVLIEEELTEKASRTKKSEKVLQQFPQEKANGLFGQFLKLMVGNKADFKKVFGLEEEAKITYASESYEEDLEGILAKVGDEYSDVFLAAKNVYDAVELSTILADSDKKSHAKLSSSMIVRFTEHQEDLKKFKRFIRENCPDEYDNLFKNEQKDGYAGYIAHAGKVSQLKFYQYVKKIIQDIAGAEYFLEKIAQENFLRKQRTFDNGVIPHQIHLAELQAIIHRQAAYYPFLKENQEKIEQLVTFRIPYYVGPLSKGDASTFAWLKRQSEEPIRPWNLQETVDLDQSATAFIERMTNFDTYLPSEKVLPKHSLLYEKFMVFNELTKISYTDDRGIKANFSGKEKEKIFDYLFKTRRKVKKKDIIQFYRNEYNTEIVTLSGLEEDQFNASFSTYQDLLKCGLTRAELDHPDNAEKLEDIIKILTIFEDRQRIRTQLSTFKGQFSAEVLKKLERKHYTGWGRLSKKLINGIYDKESGKTILDYLVKDDGVSKHYNRNFMQLINDSQLSFKNAIQKAQSSEHEETLSETVNELAGSPAIKKGIYQSLKIVDELVAIMGYAPKRIVVEMARENQTTSTGKRRSIQRLKIVEKAMAEIGSNLLKEQPTTNEQLRDTRLFLYYMQNGKDMYTGDELSLHRLSHYDIDHIIPQSFMKDDSLDNLVLVGSTENRGKSDDVPSKEVVKDMKAYWEKLYAAGLISQRKFQRLTKGEQGGLTLEDKAHFIQRQLVETRQITKNVAGILNQRYNANSKEKKVQIITLKASLTSQFRSIFGLYKVREVNDYHHGQDAYLNCVVATTLLKVYPNLAPEFVYGEYPKFQTFKENKATAKAIIYTNLLRFFTEDEPRFTKDGEILWSNSYLKTIKKELNYHQMNIVKKVEVQKGGFSKESIKPKGPSNKLIPVKNGLDPQKYGGFDSPVVAYTVLFTHEKGKKPLIKQEILGITIMEKTRFEQNPILFLEEKGFLRPRVLMKLPKYTLYEFPEGRRRLLASAKEAQKGNQMVLPEHLLTLLYHAKQCLLPNQSESLAYVEQHQPEFQEILERVVDFAEVHTLAKSKVQQIVKLFEANQTADVKEIAASFIQLMQFNAMGAPSTFKFFQKDIERARYTSIKEIFDATIIYQSTTGLYETRRKVVD

SEQ ID NO: 939 - protein, 1337 aa, Enterococcus faecalis
MKKDYVIGLDIGTNSVGWAVMTEDYQLVKKKMPIYGNTEKKKIKKNFWGVRLFEEGHTAEDRRLKRTARRRISRRRNRLRYLQAFFEEAMTDLDENFFARLQESFLVPEDKKWHRHPIFAKLEDEVAYHETYPTIYHLRKKLADSSEQADLRLIYLALAHIVKYRGHFLIEGKLSTENISVKEQFQQFMIIYNQTFVNGESRLVSAPLPESVLIEEELTEKASRTKKSEKVLQQFPQEKANGLFGQFLKLMVGNKADFKKVFGLEEEAKITYASESYEEDLEGILAKVGDEYSDVFLAAKNVYDAVELSTILADSDKKSHAKLSSSMIVRFTEHQEDLKKFKRFIRENCPDEYDNLFKNEQKDGYAGYIAHAGKVSQLKFYQYVKKIIQDIAGAEYFLEKIAQENFLRKQRTFDNGVIPHQIHLAELQAIIHRQAAYYPFLKENQEKIEQLVTFRIPYYVGPLSKGDASTFAWLKRQSEEPIRPWNLQETVDLDQSATAFIERMTNFDTYLPSEKVLPKHSLLYEKFMVFNELTKISYTDDRGIKANFSGKEKEKIFDYLFKTRRKVKKKDIIQFYRNEYNTEIVTLSGLEEDQFNASFSTYQDLLKCGLTRAELDHPDNAEKLEDIIKILTIFEDRQRIRTQLSTFKGQFSAEVLKKLERKHYTGWGRLSKKLINGIYDKESGKTILGYLIKDDGVSKHYNRNFMQLINDSQLSFKNAIQKAQSSEHEETLSETVNELAGSPAIKKGIYQSLKIVDELVAIMGYAPKRIVVEMARENQTTSTGKRRSIQRLKIVEKAMAEIGSNLLKEQPTTNEQLRDTRLFLYYMQNGKDMYTGDELSLHRLSHYDIDHIIPQSFMKDDSLDNLVLVGSTENLGKSDDVPSKEVVKDMKAYWEKLYAAGLISQRKFQRLTKGEQGGLTLEDKAHFIQRQLVETRQITKNVAGILDQRYNANSKEKKVQIITLKASLTSQFRSIFGLYKVREVNDYHHGQDAYLNCVVATTLLKVYPNLAPEFVYGEYPKFQTFKENKATAKAIIYTNLLRFFTEDEPRFTKDGEILWSNSYLKTIKKELNYHQMNIVKKVEVQKGGFSKESIKPKGPSNKLIPVKNGLDPQKYGGFDSPIVAYTVLFTHEKGKKPLIKQEILGITIMEKTRFEQNPILFLEEKGFLRPRVLMKLPKYTLYEFPEGRRRLLASAKEAQKGNQMVLPEHLLTLLYHAKQCLLPNQSESLAYVEQHQPEFQEILERVVDFAEVHTLAKSKVQQIVKLFEANQTADVKEIAASFIQLMQFNAMGAPSTFKFFQKDIERARYTSIKEIFDATIIYQSTTGLYETRRKVVD

SEQ ID NO: 940 - protein, 1337 aa, Enterococcus faecalis
MKKDYVIGLDIGTNSVGWAVMTEDYQLVKKKMPIYGNTEKKKIKKNFWGVRLFEEGHTAEDRRLKRTARRRISRRRNRLRYLQAFFEEAMTDLDENFFARLQESFLVPEDKKWHRHPIFAKLEDEVAYHETYPTIYHLRKKLADSSEQADLRLIYLALAHIVKYRGHFLIEGKLSTENTSVKEQFQQFMVIYNQTFVNGESRLVSAPLPESVLIEEELTEKASRTKKSEKVLQQFPQEKANGLFGQFLKLMVGNKADFKKVFGLEEEAKITYASESYEEDLEGILAKVGDEYSDVFLAAKNVYDAVELSTILADSDKKSHAKLSSSMIVRFTEHQEDLKKFKRFIRENCPDEYDNLFKNEQKDGYAGYIAHAGKVSQLKFYQYVKKIIQDIAGAEYFLEKIAQENFLRKQRTFDNGVIPHQIHLAELQAIIHRQAAYYPFLKENQEKIEQLVTFRIPYYVGPLSKGDASTFAWLKRQSEEPIRPWNLQETVDLDQSATAFIERMTNFDTYLPSEKVLPKHSLLYEKFMVFNELTKISYTDDRGIKANFSGKEKEKIFDYLFKTRRKVKKKDIIQFYRNEYNTEIVTLSGLEEDQFNASFSTYQDLLKCGLTRAELDHPDNAEKLEDIIKILTIFEDRQRIRTQLSTFKGQFSAEVLKKLERKHYTGWGRLSKKLINGIYDKESGKTILDYLVKDDGVSKHYNRNFMQLINDSQLSFKNAIQKAQSSEHEETLSETVNELAGSPAIKKGIYQSLKIVDELVAIMGYAPKRIVVEMARENQTTSTGKRRSIQRLKIVEKAMAEIGSNLLKEQPTTNEQLRDTRLFLYYMQNGKDMYTGDELSLHRLSHYDIDHIIPQSFMKDDSLDNLVLVGSTENRGKSDDVPSKKVVKKMKAYWEKLYAAGLISQRKFQRLTKGEQGGLTLEDKAHFIQRQLVETRQITKNVAGILDQRYNAKSKEKKVQIITLKASLTSQFRSIFGLYKVREVNDYHHGQDAYLNCVVATTLLKVYPNLAPEFVYGEYPKFQAFKENKATAKTIIYTNLMRFFTEDEPRFTKDSEILWSNSYLKTIKKELNYHQMNIVKKVEVQKGGFSKESIKPKGPSNKLIPVKNGLDPQKYGGFDSPVVAYTVLFTHEKGKKPLIKQEILGITIMEKTRFEQNPILFLEEKGFLRPRVLMKLPKYTLYEFPEGRRRLLASAKEAQKGNQMVLPEHLLTLLYHAKQCLLPNQSESLAYVEQHQPEFQEILERVVDFAEVHTLAKSKVQQIVKLFEANQTADVKEIAASFIQLMQFNAMGAPSTFKFFQKDIERARYTSIKEIFDATIIYQSTTGLYETRRKVVD

SEQ ID NO: 941 - protein, 1150 aa, Enterococcus faecalis
MYSIGLDLGISSVGWSVIDERTGNVIDLGVRLFSAKNSEKNLERRTNRGGRRLIRRKTNRLKDAKKILAAVGFYEDKSLKNSCPYQLRVKGLTEPLSKGEIYKVTLHILKKRGISYLDEDDTEAAKESQDYKEQVRENAQLLTKYTPGQIQLQRLKENNRVKTGINAQGNYQLNVFKVSAYANELATILKTQQAFYPNELTDDWIALFVQPGIAEEAGLIYRKRPYYHGPGNEANNSPYGRWSDFKKTGQPATNIFDKLIGKDFQGELRASGLSLSAQQYNLLNDLTNLKIDGEIPLSPEQKEYILAELMTKEFTRFGVNDVVKLLGVKKERLSGWRLDKKGKPEIHTLKGYRNWRKIFAESGIDLAMLPTETIDCLAKILTLNTEREGIENTLAFELPELAESVKLLVLDRYKELSQSVSTQAWHRFSLKTLHLLIPELMNATSEQNTLLEQFQLKSDVRKRYSEYKKLPTKDVLTEIYNPTVNKTVSQAFKVIDALLVKYGKEQIRYITIEMPRDDNEEDEKKRIKELHAKNSQRKNDSQSYFMQKSGWSQEKFQTTIQKNRRFLAKLLYYYEQDGICAYTGLSISPELLVSDSTEIDHIIPISISLDDSINNKVLVLSKANQVKGQQTPYDAWMDGSFKKINGKFSNWDDYQKWVESRHFSHKKENNLLETRNIFDSEQVEKFLARNLNDTRYASRLVLNTLQSFFANQETKVRVVNGSFTHTLRKKWGADLDKTRETHHHHAVDATLCAVTPFVKVSRYHYAVKEETGEKVMREIDFETGEIVDEMSYREFKKSKKYERKTYQVKWPNFREQLKPVNLHPRIKFSHQVDRKANRKLSDATIYSVREKTEVKTLKSGKQKITTDEYTIGKIKDIYTVDGWEAFKKKQDKLLMKDLDEKTYERLLSIAETTPDFQEVEEKNGKVKRVKRSPFAVYCEENDIPAIRKYAKKNNGPLIRSLKYYDGKLNKHINITKDSQGRPVEKTKNGRKVTLQSLKPYRYDIYQDLETKAYYTVQLYYSDLRFVEGKYGITEKEYMKKVAEQTKGQVVRFCFSLQKNDGLEIEWKDSQRYDVRFYNFQSANSINFKGLEQEMMPAENQFKQKPYNNGAINLNIAKYGKEGKKLRKFNTDILGKKHYLYYEKEPKNIIK

SEQ ID NO: 942 - protein, 1150 aa, Enterococcus faecalis
MYSIGLDLGISSVGWSVIDERTGNVIDLGVRLFSAKNSEKNLERRTNRGGRRLIRRKTNRLKDAKKILAAVGFYEDKSLKNSCPYQLRVKGLTEPLSKGEIYKVTLHILKKRGISYLDEDDTEAAKESQDYKEQVRKNAQLLTKYTPGQIQLQRLKENNRVKTGINAQGNYQLNVFKVSAYANELATILKTQQAFYPNELTDDWIALFVQPGIAEEAGLIYRKRPYYHGPGNEANNSPYGRWSDFKKTGQPATNIFDRLIGKDFQGELRASGLSLSAQQYNLLNDLTNLKIDGEIPLSPEQKEYILAELMTKEFTRFGVNDVAKLLGVKKERLSGWRLDKKGKPEIHTLKGYRNWRKIFAESGIDLATLPTETIDCLAKVLTLNTEHEGIENTLAFELPELAESVKLLVLDRYKELSQSVSTQAWHRFSLKTLHLLIPELMNATSEQNTLLEQFQLKSDVRKRYSEYKKLPTKDVLTEIYNPTVNKTVSQAFKVIDALLVKYGKEQIRYITIEMPRDDNEEDEKKRIKELHAKNSQRKNDSQSYFMQKSGWSQEKFQTTIQKNRRFLAKLLYYYEQDGICAYTGLSISPELLVSDSTEIDHIIPISISLDDSINNKVLVLSKANQVKGQQTPYDAWMDGSFKKINGKFSNWDDYQKWVESRHFSHKKENNLLETRNIFDSEQVEKFLARNLNDTRYASRLVLNTLQSFFANHETKVRVVNGSFTHTLRKKWGADLDKTRETHHHHAVDATLCAVTPFVKVSRYHYAVKEETGEKVMREIDFETGEIVDEMSYQEFKKSKKYERKTYQVKWPNFREQLKPVNLHPRIKFSHQVDRKANRKLSDATIYSVREKTEVKTLKSGKQKITTDEYTIGKIKDIYTVDGWEAFKKKQDKLLMKDLDEKTYERLLSIAETTPDFQEVEEKNGKVKRVKRSPFAVYCEENDIPAIQKYAKKNNGPLIRSLKYYDGKLNKHINITKDSQGRPVEKTKNGRKVTLQSLKPYRYDIYQDLETKAYYTVQLYYSDLRFVEGKYGITEKEYMKKVAEQTKGQVVRFCFSLQKNDGLEIEWKDSQRYDVRFYNFQSANSINFKGLEQEMMPAENQFKQKPYNNGAINLNIAKYGKEGKKLRKFNTDILGKKHYLYYEKEPKNIIK

SEQ ID NO: 943 - protein, 1150 aa, Enterococcus faecalis
MYSIGLDLGISSVGWSVIDERTGNVIDLGVRLFSAKNSEKNLERRTNRGGRRLIRRKTNRLKDAKKILAAVGFYEDKSLKNSCPYQLRVKGLTEPLSKGEIYKVTLHILKKRGISYLDEDDTEAAKESQDYKEQVRKNAQLLTKYTPGQIQLQRLKENNRVKTGINVQGNYQLNVFKVSAYANELATILKTQQAFYPNELTDDWIALFVQPGIAEEAGLIYRKRPYYHGPGNEANNSPYGRWSDFQKTGEPATNIFDKLIGKDFQGELRASGLSLSAQQYNLLNDLTNLKIDGEVPLSSEQKEYILTELMTKEFTRFGVNDVVKLLGVKKERLSGWRLDKKGKPEIHTLKGYRNWRKIFAEAGIDLATLPTETIDCLAKVLTLNTEREGIENTLAFELPELSESVKLLVLDRYKELSQSISTQSWHRFSLKTLHLLIPELMNATSEQNTLLEQFQLKSDVRKRYSEYKKLPTKDVLAEIYNPTVNKTVSQAFKVIDALLVKYGKEQIRYITIEMPRDDNEEDEKKRIKELHAKNSQRKNDSQSYFMQKSGWSQEKFQTTIQKNRRFLAKLLYYYEQDGICAYTGLPISPELLVSDSTEIDHIIPISISLDDSINNKVLVLSKANQVKGQQTPYDAWMDGSFKKINGKFSNWDDYQKWVESRHFSHKKENNLLETRNIFDSEQVEKFLARNLNDTRYASRLVLNTLQSFFTNQETKVRVVNGSFTHTLRKKWGADLDKTRETHHHHAVDATLCAVTPFVKVSRYHYAVKEETGEKVMREIDFETGEIVNEMSYREFKKSKKYERKTYQVKWPNFREQLKPVNLHPRIKFSHQVDRKANRKLSDATIYSVREKTEVKTLKSGKQKITTDEYTIGKIKDIYTLDGWEAFKKKQDKLLMKDLDEKTYERLLSIAETTPDFQEVEEKNGKVKRVKRSPFAVYCEENDIPAIQKYAKKNNGPLIRSLKYYDGKLNKHINITKDSQGRPVEKTKNGRKVTLQSLKPYRYDIYQDLETKAYYTVQLYYSDLRFVEGKYGITEKEYMKKVAEQTKGQVVRFCFSLQKNDGLEIEWKDSQRYDVRFYNFQSANSINFKGLEQEIMPAENQFKQKPYNNGAINLNIAKYGKEGKKLRKFNTDILGKKHYLFYEKEPKNIIK

SEQ ID NO: 944 - protein, 1150 aa, Enterococcus faecalis; identical to SEQ ID NO: 178

SEQ ID NO: 945 - protein, 1150 aa, Enterococcus faecalis; identical to SEQ ID NO: 179

SEQ ID NO: 946 - protein, 1340 aa, Enterococcus faecium
MKKEYTIGLDIGTNSVGWSVLTDDYRLVSKKMKVAGNTEKSSTKKNFWGVRLFDEGQTAEARRSKRTARRRLARRRQRILELQKIFAPEILKIDEHFFARLNESFLVLDEKKQSRHPVFATIKQEKSYHQTYPTIYHLRQALADSSEKADIRLVYLAMAHLLKYRGHFLIEGELNTENSSVTETFRQFLSTYNQQFSEADDKQTEKLDEAVDCSFVFTEKMSKTKKAETLLKYFPHEKSNGYLSQFIKLMVGNQGNFKNVFGLEEEAKLQFSKETYEEDLEELLEKIGDDYIDLFVQAKNVYDAVLLSEILSDSTKNTRAKLSAGMIRRYDAHKEDLVLLKRFVKENLPKKYRAFFGDNSVNGYAGYIEGHATQEDFYKFVKKELTGIRGSEVFLTKIEQENFLRKQRTFDNGVIPHQIHLTELRAIIANQKKHYPFLKEEQEKLESLLTFKIPYYVGPLAKKQENSPFAWLIRKSEEKIKPWNLPEIVDMEGSAVRFIERMNNTDMYIPHNKVLPKNSLLYQKFSIYNELTKVRYQDERGQMNYFSSIEKKEIFHELFEKNRKVTKKDLQEFLYLKYDIKHAELSGIEKAFNASYTTYHDFLTMSENKREMKQWLEDPELASMFEEIIKTLTVFEDREMIKTRLSHHEATLGKHIIKKLTKKHYTGWGRLSKELIQGIRDKQSNKTILDYLINDDDFPHHRNRNFMQLINDDSLSFKKEIKKAQMITDTENLEEIVKELTGSPAIKKGILQSLKIVDEIVGIMGYEPANIVVEMARENQTTGRGLKSSRPRLKALEESLKDFGSQLLKEYPTDNSSLQKDRLYLYYLQNGRDMYTGAPLDIHRLSDYDIDHIIPRSFTTDNSIDNKVLVSSKENRLKKDDVPSEKVVKKMRSFWYDLYSSKLISKRKLDNLTKIKLTEEDKAGFIKRQLVETRQITKHVAGILHHRFNKAEDTNEPIRKVRIITLKSALVSQFRNRFGIYKVREINEYHHAHDAYLNGVVALALLKKYPQLAPEFVYGEYLKFNAHKANKATVKKEFYSNIMKFFESDTPVCDENGEIFWDKSKSIAQVKKVINHHHMNIVKKTEIQKGGFSKETVEPKKDSSKLLPRKNNWDPAKYGGLGSPNVAYTVAFTYEKGKARKRTNALEGITIMEREAFEQSPVLFLKNKGYEQAEIEMKLPKYALFELENGRKRMVASNKEAQKANSFLLPEHLVTLLYHAKQYDEISHKESFDYVNEHHKEFSEVFARVLEFAGKYTLAEKNIEKLEKIYKENQTDDLAKLASSFVNLMQFNAMGAPADFKFFDVTIPRKRYTSLTEIWQSTIIHQSITGLYETRIRMGK

SEQ ID NO: 947 - protein, 1339 aa, Enterococcus faecium
MKKEYTIGLDIGTNSVGWSVLTDDYRLVSKKMKVAGNTEKSSTKKNFWGVRLFDEGQTAEARRSKRTARRRLARRRQRILELQKIFAPEILKIDEHFFARLNESFLVLDEKKQSRHPVFATIKQEKSYHQTYPTIYHLRQALADSSEKADIRLVYLAMAHLLKYRGHFLIEGELNTENSSVTETFRQFLSTYNQQFSEADDKQTEKLDEAVDCSFVFTEKMSKTKKAETLLKYFPHEKSNGYLSQFIKLMVGNQGNFKNVFGLEEAKLQFSKETYEEDLEELLEKIGDDYIDLFVQAKNVYDAVLLSEILSDSTKNTRAKLSAGMIRRYDAHKEDLVLLKRFVKENLPKKYRAFFGDNSVNGYAGYIEGHATQEDFYKFVKKELTGIRGSEVFLTKIEQENFLRKQRTFDNGVIPHQIHLTELRAIIANQKKHYPFLKEEQEKLESLLTFKIPYYVGPLAKKQENSPFAWLIRKSEEKIKPWNLPEIVDMEGSAVRFIERMINTDMYMPHNKVLPKNSLLYQKFSIYNELTKVRYQDERGQMNYFSSIEKKEIFHELFEKNRKVTKKDLQEFLYLKYDIKHAELSGIEKAFNASYTTYHDFLTMSENKREMKQWLEDPELASMFEEIIKTLTVFEDREMIKTRLSHHEATLGKHIIKKLTKKHYTGWGRLSKELIQGIRDKQSNKTILDYLINDDDFPHHRNRNFMQLINDDSLSFKKEIKKAQMITDTENLEEIVKELTGSPAIKKGILQSLKIVDEIVGIMGYEPANIVVEMARENQTTGRGLKSSRPRLKALEESLKDFGSQLLKEYPTDNSSLQKDRLYLYYLQNGRDMYTGAPLDIHRLSDYDIDHIIPRSFTTDNSIDNKVLVSSKENRLKKDDVPSEKVVKKMRSFWYDLYSSKLISKRKLDNLTKIKLTEEDKAGFIKRQLVETRQITKHVAGILHHRFNKAEDTNEPIRKVRIITLKSALVSQFRNRFGIYKVREINEYHHAHDAYLNGVVALALLKKYPQLAPEFVYGEYLKFNAHKANKATVKKEFYSNIMKFFESDTPVCDENGEIFWDKSKSIAQVKKVINHHHMNIVKKTEIQKGGFSKETVEPKKDSSKLLPRKNNWDPAKYGGLGSPNVAYTVAFTYEKGKARKRTNALEGITIMEREAFEQSPVLFLKNKGYEQAEIEMKLPKYALFELENGRKRMVASNKEAQKANSFLLPEHLVTLLYHAKQYDEISHKESFDYVNEHHKEFSEVFARVLEFAGKYTLAEKNIEKLEKIYKENQTDDLAKLASSFVNLMQFNAMGAPADFKFFDVTIPRKRYTSLTEIWQSTIIHQSITGLYETRIRMGK

SEQ ID NO: 948 - protein, 1340 aa, Enterococcus faecium
MKKEYTIGLDIGTNSVGWSVLTDDYRLVSKKMKVAGNTEKSSTKKNFWGVRLFDEGQTAEARRSKRTARRRLARRRQRILELQKIFAPEILKIDEHFFARLNESFLVLDEKKQSRHPVFATIKQEKSYHQTYPTIYHLRQALADSSEKADIRLVYLAMAHLLKYRGHFLIEGELNTENSSVTETFRQFLSTYNQQFSEADDKQTEKLDEAVDCSFVFTEKMSKTKKAETLLKYFPHEKSNGYLSQFIKLMVGNQGNFKNVFGLEEEAKLQFSKETYEEDLEELLEKIGDDYIDLFVQAKNVYDAVLLSEILSDSTKNTRAKLSAGMIRRYDAHKEDLVLLKRFVKENLPKKYRAFFGDNSVNGYAGYIEGHATQEDFYKFVKKELTGIRGSEVFLTKIEQENFLRKQRTFDNGVIPHQIHLTELRAIIANQKKHYPFLKEEQEKLESLLTFKIPYYVGPLAKKQENSPFAWLIRKSEEKIKPWNLPEIVDMEGSAVRFIERMINTDMYIPHNKVLPKNSLLYQKFSIYNELTKVRYQDERGQMNYFSSIEKKEIFHELFEKNRKVTKKDLQEFLYLKYDIKHAELSGIEKAFNASYTTYHDFLTMSENKREMKQWLEDPELASMFEEIIKTLTVFEDREMIKTRLSHHEATLGKHIIKKLTKKHYTGWGRLSKELIQGIRDKQSNKTILDYLINDDDFPHHRNRNFMQLINDDSLSFKKEIKKAQMITDTENLEEIVKELTGSPAIKKGILQSLKIVDEIVGIMGYEPANIVVEMARENQTTGRGLKSSRPRLKALEESLKDFGSQLLKEYPTDNSSLQKDRLYLYYLQNGRDMYTGAPLDIHRLSDYDIDHIIPRSFTTDNSIDNKVLVSSKENRLKKDDVPSEKVVKKMRSFWYDLYSSKLISKRKLDNLTKIKLTEEDKAGFIKRQLVETRQITKHVAGILHHRFNKAEDTNEPIRKVRIITLKSALVSQFRNRFGIYKVREINEYHHAHDAYLNGVVALALLKKYPQLAPEFVYGEYLKFNAHKANKATVKKEFYSNIMKFFESDTPVCDENGEIFWDKSKSIAQVKKVINHHHMNIVKKTEIQKGGFSKETVEPKKDSSKLLPRKNNWDPAKYGGLGSPNVAYTVAFTYEKGKARKRTNALEGITIMEREAFEQSPVLFLKNKGYEQAEIEMKLPKYALFELENGRKRMVASNKEAQKANSFLLPEHLVTLLYHAKQYDEISHKESFDYVNEHHKEFSEVFARVLEFAGKYTLAEKNIEKLEKIYKENQTDDLAKLASSFVNLMQFNAMGAPADFKFFDVTIPRKRYTSLTEIWQSTIIHQSITGLYETRIRMGK

SEQ ID NO: 949 - protein, 1340 aa, Enterococcus faecium
MKKEYTIGLDIGTNSVGWSVLTDDYRLVSKKMKVAGNTEKSSTKKNFWGVRLFDEGQTAEARRSKRTARRRLARRRQRILELQKIFAPEILKIDEHFFARLNESFLVLDEKKQSRHPVFATIKQEKSYHQTYPTIYHLRQALADSSEKADIRLVYLAMAHLLKYRGHFLIEGELNTENSSVTETFRQFLSTYNQQFSEADDKQTEKLDEAVDCSFVFTEKMSKTKKAETLLKYFPHEKSNGYLSQFIKLMVGNQGNFKNVFGLEEEAKLQFSKETYEEDLEELLEKIGDDYIDLFVQAKNVYDAVLLSEILSDSTKNTRAKLSAGMIRRYDAHKEDLVLLKRFVKENLPKKYRAFFGDNSVNGYAGYIEGHATQEDFYKFVKKELTGIRGSEVFLTKIEQENFLRKQRTFDNGVIPHQIHLTELRAIIANQKKHYPFLKEEQEKLESLLTFKIPYYVGPLAKKQENSPFAWLIRKSEEKIKPWNLPEIVDMEGSAVRFIERMINTDMYMPHNKVLPKNSLLYQKFSIYNELTKVRYQDERGQMNYFSSIEKKEIFHELFEKNRKVTKKDLQEFLYLKYDIKHAELSGIEKAFNASYTTYHDFLTMSENKREMKQWLEDPELASMFEEIIKTLTVFEDREMIKTRLSHHEATLGKHIIKKLTKKHYTGWGRLSKELIQGIRDKQSNKTILDYLINDDDFPHHRNRNFMQLINDDSLSFKKEIKKAQMITDTENLEEIVKELTGSPAIKKGILQSLKIVDEIVGIMGYEPANIVVEMARENQTTGRGLKSSRPRLKALEESLKDFGSQLLKEYPTDNSSLQKDRLYLYYLQNGRDMYTGAPLDIHRLSDYDIDHIIPRSFTTDNSIDNKVLVSSKENRLKKDDVPSEKVVKKMRSFWYDLYSSKLISKRKLDNLTKIKLTEEDKAGFIKRQLVETRQITKHVAGILHHRFNKAEDTNEPIRKVRIITLKSALVSQFRNRFGIYKVREINEYHHAHDAYLNGVVALALLKKYPQLAPEFVYGEYLKFNAHKANKATVKKEFYSNIMKFFESDTPVCDENGEIFWDKSKSIAQVKKVINHHHMNIVKKTEIQKGGFSKETVEPKKDSSKLLPRKNNWDPAKYGGLGSPNVAYTVAFTYEKGKARKRTNALEGITIMEREAFEQSPVLFLKNKGYEQAEIEMKLPKYALFELENGRKRMVASNKEAQKANSFLLPEHLVTLLYHAKQYDEISHKESFDYVNEHHKEFSEVFARVLEFAGKYTLAEKNIEKLEKIYKENQTDDLAKLASSFVNLMQFNAMGAPADFKFFDVTIPRKRYTSLTEIWQSTIIHQSITGLYETRIRMGK

SEQ ID NO: 950 - protein, 1339 aa, Enterococcus faecium
MKKEYTIGLDIGTNSVGWSVLTDDYRLVSKKMKVAGNTEKSSTKKNFWGVRLFDEGQTAEARRSKRTARRRLARRRQRILELQKIFAPEILKIDEHFFARLNESFLVLDEKKQSRHPVFATIKQEKSYHQTYPTIYHLRQALADSSEKADIRLVYLAMAHLLKYRGHFLIEGELNTENSSVTETFRQFLSTYNQQFSEADDKQTEKLDEAVDCSFVFTEKMSKTKKAETLLKYFPHEKSNGYLSQFIKLMVGNQGNFKNVFGLEEAKLQFSKETYEEDLEELLEKIGDDYIDLFVQAKNVYDAVLLSEILSDSTKNTRAKLSAGMIRRYDAHKEDLVLLKRFVKENLPKKYRAFFGDNSVNGYAGYIEGHATQEDFYKFVKKELTGIRGSEVFLTKIEQENFLRKQRTFDNGVIPHQIHLTELRAIIANQKKHYPFLKEEQEKLESLLTFKIPYYVGPLAKKQENSPFAWLIRKSEEKIKPWNLPEIVDMEGSAVRFIERMINTDMYIPHNKVLPKNSLLYQKFSIYNELTKVRYQDERGQMNYFSSIEKKEIFHELFEKNRKVTKKDLQEFLYLKYDIKHAELSGIEKAFNASYTTYHDFLTMSENKREMKQWLEDPELASMFEEIIKTLTVFEDREMIKTRLSHHEATLGKHIIKKLTKKHYTGWGRLSKELIQGIRDKQSNKTILDYLINDDDFPHHRNRNFMQLINDDSLSFKKEIKKAQMITDTENLEEIVKELTGSPAIKKGILQSLKIVDEIVGIMGYEPANIVVEMARENQTTGRGLKSSRPRLKALEESLKDFGSQLLKEYPTDNSSLQKDRLYLYYLQNGRDMYTGAPLDIHRLSDYDIDHIIPRSFTTDNSIDNKVLVSSKENRLKKDDVPSEKVVKKMRSFWYDLYSSKLISKRKLDNLTKIKLTEEDKAGFIKRQLVETRQITKHVAGILHHRFNKAEDTNEPIRKVRIITLKSALVSQFRNRFGIYKVREINEYHHAHDAYLNGVVALALLKKYPQLAPEFVYGEYLKFNAHKANKATVKKEFYSNIMKFFESDTPVCDENGEIFWDKSKSIAQVKKVINHHHMNIVKKTEIQKGGFSEETVEPKKDSSKLLPRKNNWDPAKYGGLGSPNVAYTVAFTYEKGKARKRTNALEGITIMEREAFEQSPVLFLKNKGYEQAEIEMKLPKYALFELENGRKRMVASNKEAQKANSFLLPEHLVTLLYHAKQYDEISHKESFDYVNEHHKEFSEVFARVLEFAGKYTLAEKNIEKLEKIYKENQTDDLAKLASSFVNLMQFNAMGAPADFKFFDVTIPRKRYTSLTEIWQSTIIHQSITGLYETRIRMGK

SEQ ID NO: 951 - protein, 1340 aa, Enterococcus faecium
MKKEYTIGLDIGTNSVGWSVLTDDYRLVSKKMKVAGNTEKSSTKKNFWGVRLFDEGQTAEARRSKRTARRRLARRRQRILELQKIFAPEILKIDEHFFARLNESFLVLDEKKQSRHPVFATIKQEKSYHQTYPTIYHLRQALADSSEKADIRLVYLAMAHLLKYRGHFLIEGELNTENSSVTETFRQFLSTYNQQFSEADDKQTEKLDEAVDCSFVFTEKMSKTKKAETLLKYFPHEKSNGYLSQFIKLMVGNQGNFKNVFGLEEEAKLQFSKETYEEDLEELLEKIGDDYIDLFVQAKNVYDAVLLSEILSDSTKNTRAKLSAGMIRRYDAHKEDLVLLKRFVKENLPKKYRAFFGDNSVNGYAGYIEGHATQEDFYKFVKKELTGIRGSEVFLTKIEQENFLRKQRTFDNGVIPHQIHLTELRAIIANQKKHYPFLKEEQEKLESLLTFKIPYYVGPLAKKQENSPFAWLIRKSEEKIKPWNLPEIVDMEGSAVRFIERMINTDMYIPHNKVLPKNSLLYQKFSIYNELTKVRYQDERGQMNYFSSIEKKEIFHELFEKNRKVTKKDLQEFLYLKYDIKHAELSGIEKAFNASYTTYHDFLTMSENKREMKQWLEDPELASMFEEIIKTLTVFEDREMIKTRLSHHEATLGKHIIKKLTKKHYTGWGRLSKELIQGIRDKQSNKTILDYLINDDDFPHHRNRNCMQLINDDSLSFKKEIKKAQMITDTENLEEIVKELTGSPAIKKGILQSLKIVDEIVGIMGYEPANIVVEMARENQTTGRGLKSSRPRLKALEESLKDFGSQLLKEYPTDNSSLQKDRLYLYYLQNGRDMYTGAPLDIHRLSDYDIDHIIPRSFTTDNSIDNKVLVSSKENRLKKDDVPSEKVVKKMRSFWYDLYSSKLISKRKLDNLTKIKLTEEDKAGFIKRQLVETRQITKHVAGILHHRFNKAEDTNEPIRKVRIITLKSALVSQFRNRFGIYKVREINEYHHAHDAYLNGVVALALLKKYPQLAPEFVYGEYLKFNAHKANKATVKKEFYSNIMKFFESDTPVCDENGEIFWDKSKSIAQVKKVINHHHMNIVKKTEIQKGGFSKETVEPKKDSSKLLPRKNNWDPTKYGGLGSPNVAYTVAFTYEKGKARKRTNALEGITIMEREAFEQSPVLFLKNKGYEQAEIEMKLPKYALFELENGRKRMVASNKEAQKANSFLLPEHLVTLLYHAKQYDEISHKESFDYVNEHHKEFSEVFARVLEFAGKYTLAEKNIEKLEKIYKENQTDDLAKLASSFVNLMQFNAMGAPADFKFFDVTIPRKRYTSLTEIWQSTIIHQSITGLYETRIRMGK

SEQ ID NO: 952 - protein, 892 aa, Enterococcus faecium
MTFKIPYYVGPLAKKQENSPFAWLIRKSEEKIKPWNLPEIVDMEGSAVRFIERMINTDMYMPHNKVLPKNSLLYQKFSIYNELTKVRYQDERGQMNYFSSIEKKEIFHELFEKNRKVTKKDLQEFLYLKYDIKHAELSGIEKAFNASYTTYHDFLTMSENKREMEQWLEDPELASMFEEIIKTLTVFEDREMIKTRLSHHKATLGKHIIKKLTKKHYTGWGRLSKELIQGIRDKQSNKTILDYLINDDDFPHHRNRNFMQLINDDSLSFKKEIKKAQMITDTENLEEIVKELTGSPAIKKGILQSLKIVDEIVGIMGYEPANIVVEMARENQTTGRGLKSSRPRLKALEESLKDFGSQLLKEYPTDNSSLQKDRLYLYYLQNGRDMYTGAPLDIHRLSDYDIDHIIPRSFTTDNSIDNKVLVSSKENRLKKDDVPSEKVVKKMRSFWYDLYSSKLISKRKLDNLTKIKLTEEDKAGFIKRQLVETRQITKHVAGILHHRFNKAEDTNEPIRKVRIITLKSALVSQFRNRFGIYKVREINEYHHAHDAYLNGVIALALLKKYPQLAPEFVYGEYLKFNAHKANKATVKKEFYSNIMKFFESDTPVCDENGEIFWDKSKSIAQVKKVINHHHMNIVKKTEIQKGGFSKETVEPKKDSSKLLPRKNNWDPAKYGGLGSPNVAYTVAFTYEKGKARKRTNALEGITIMEREAFEQSPVLFLKNKGYEQAEIEMKLPKYALFELENGRKRMVASNKEAQKANSFLLPEHLVTLLYHAKQYDEISHKESFDYVNEHHKEFSEVFARVLEFAGKYTLAEKNIEKLEKIYKENQTDDLAKLASSFVNLMQFNAMGAPADFKFFDVTIPRKRYTSLTEIWQSTIIHQSITGLYETRIRMGK

SEQ ID NO: 953 - protein, 1336 aa, Enterococcus hirae
MTKDYTIGLDIGTNSVGWAVLTDDYQLMKRKMSVHGNTEKKKIKKNFWGARLFDEGQTAEFRRTKRTNRRRLARRKYRLSKLQDLFAEELCKQDDCFFVRLEESFLVPEEKQYKPASIFPTLEEEKEYYQKYPTIYHLRQKLVDSTEKEDLRLVYLALAHLLKYRGHFLFEGDLDTENTSIEESFRVFLEQYSKQSDQPLIVHQPVLTILTDKLSKTKKVEEILKYYPTEKINSFFAQCLKLIVGNQANFKRIFDLEAEVKLQFSKETYEEDLESLLEKIGDEYLDIFLQAKKVHDAILLSEIISSTVKHTKAKLSSGMVERYERHKADLAKFKQFVKENVPQKATVFFKDTTKNGYAGYIKGKTTQEEFYKFVKKELSGVVGSEPFLEKIDQETFLLKQRTYTNGVIPHQVHLIELKAIIDQQKQHYPFLEEAGPKIIALFKFRIPYYVGPLAKEQEASSFAWIERKTAEKINPWNFSEVVDIEKSAMRFIQRMTKQDTYLPTEKVLPKNSLLYQKYMIFNELTKVSYKDERGVKQYFSGDEKQQIFKQLFQKERGKITVKKLQNFLYTHYHIENAQIFGIEKAFNASYSTYHDFMKLAKTNQKAMQEWLEQPEMEPIFEDIVKILTIFEDRQMIKHQLSKYQEVFGEKLLKEFARKHYTGWGRFSAKLIHGIRDRKTNKTILDYLINDDDVPANRNRNLMQLINDEHLSFKEEIAKATVFSKHKSLVDVIQDLPGSPAIKKGIWQSLKIVEELIAIIGYKPKNIVIEMARENQKTHRTSPRLKALENGLKQIGSTLLKEQPTDNKALQKERLYLYYLQNGRDMYTGEPLEIENLHQYEVDHIIPRSFIVDNSIDNKVLVASKQNQKKRDDVPKKQIVNEQRIFWNQLKEAKLISPKKYAYLTKIELTPEDKARFIQRQLVETRQITKHVANILHQSFNQEEEGTDCDGVQIITLKATLTSQFRQTFGLYKVREINPHHHAHDAYLNGFIANVLLKRYPKLAPEFVYGKYVKYSLARENKATAKKEFYSNILKFLESDEPFCDENGEIYWEKSHHLPRIKKVLSSHQVNVVKKVEQQKGGFYKETVNSKEKPDKLIERKNNWDVTKYGGFGSPVIAYAIAFVYAKGKTQKKTRAIEGITIMEQAAFEKDPTTFLKEKGFPQVTEFIKLPKYTLFEFDNGRRRFLASHKESQKGNPFILSDQLVTLLYHAQHYDKITYQESFDYVNTHLSDFSAILTEVLAFAEKYTLADKNIERIQELYEENKYGETSMIAQSFLQLLQFNAIGAPADFKFFGVTIPRKRYTSLTEIWDATIIYQSVTGLYETRIRMGDLWAGEQ

SEQ ID NO: 954 - protein, 116 aa, Enterococcus sp.
MYSIGLDLGISSVGWSVIDERTGNVIDLGVRLFSAKNSEKNLERRTNRGGRRLIRRKTNRLKDAKKILAAVGFYEDKSLKNSCPYQLRVKGLTELLSKGEIYKVTLHILKNVELVT

SEQ ID NO: 955 - protein, 1391 aa, Eubacterium sp.
MENKQYYIGLDVGTNSVGWAVTDTSYNLLRAKGKDMWGARLFDEAKTAVERRTKRTSRRRSEREKARKAMLKELFADEINKVDPNFFIRLEESKFFLDDRSENNRQRYTLFNDAKFTDKDYYEKYKTIFHLRSALINSDEKFDVRLVFLAILNLFSHRGHFLNASLKGDGEIQGVDIFYNDLYEVCEEFEIDLPQISNIDNFEKILSQKGKSRTKILEELSEELSISKKEKIKYSLLKLICGMKIKVVDIYADEDIQEDDKKKDLGFRESDYEKSSLEVKEIIGDDHFELIERAKAVHDIGLLANIIGNSKYLCEARVEAYDNHHKDLQKIKELLKKYDIKAYTDMFRKMTDKNYSAYVGSVNSNIAKERRSVDNRKIEDLYEYIKKIALKNISDDNEDKIEILKKIETGEFLKKQLTASNGVIPNQLQSRELRAILKKAENYLPFLKEKGEKNLTVSEMIIQLFEFQIPYYVGPLDKNPKKDKNANSWAVIPSGGRILPWNFEDKVDVKGSRKEFIEKMVRKCTYLSEEHTLPKQSLLYEKFMVLNEINNIKIDGEKISVEAKQKIYNDLFMKGKKVSQKAIKQELISLNIMSKDSVLSGIDTVCNAYLSSIAKFRGVFDENVNNQSTIDMIEDIIFLKTVYSDEKRFVKEEIVEKYGDEIDKDKIKRILGFKFSNWGNISKSFLELEGADVGTGEIRSIIQSLWETNFNLMELLSSRFTYMDELEKRVKKLEKPLSEWTIEDLDDMYLSSPVKRMIWQSMKIVDEIQTVIGYAPKRIFVEMTRSEGEKVRTKSRKDRLKELYSAIKEDSKQWVKELDAKDESYFRSKKMYLYYLQKGRCMYSGEVIELDKLMDDNLYDIDHIYPRSFVKDDSLDNLVLVKKEINNRKQNDPITPQIQASCQGFWKVLHEQGFISNEKYSRLTRKTQEFSDEEKLSFINRQIVETGQATKCMAQILQKSMGEDVDVVFSKARLVSEFRHKFELFKSRLINDFHHANDAYLNIVVGNSYFVKFTRNPANFIKDARKNPDNPAYKYHMDRFFERDVKSKSEVAWIGQSEGNAGTIAIVKKTMSKNSPLITKKVEEGHGSITKETIVGVKEIKFGRNKVEKADKTPKKANLQAYRPIKTSDERLCNILRYGGRTSISISGYCLVEYVKKRKTIRSLEAIPVYLGRKDSLSEEKLLNYFRYNLNDGGKDSVSDIRLCLPFISTNSLVKIDGYLYYLGGKNDDRIQLYNAYQLKMKKEEVEYIRKIEKAVSMSKFDEIDREKNPVLTEEKNIELYNKIQDKFENTVFSKRMSLVKYNKKDLSFGDFLKNKKSKFEEIDLEKQCKVLYNIIFNLSNLKEVDLSDIGGSKSTGKCRCKKNITNYKEFKLIQQSITGLYSCEKDLMTI

SEQ ID NO: 956 - protein, 1391 aa, Eubacterium yurii
MENKQYYIGLDVGTNSVGWAVTDTSYNLLRAKGKDMWGARLFEKANTAAERRTKRTSRRRSEREKARKAMLKELFADEINRVDPSFFIRLEESKFFLDDRSENNRQRYTLFNDATFTDKDYYEKYKTIFHLRSALINSDEKFDVRLVFLAILNLFSHRGHFLNASLKGDGDIQGMDVFYNDLVESCEYFEIELPRITNIDNFEKILSQKGKSRTKILEELSEELSISKKDKSKYNLIKLISGLEASVVELYNIEDIQDENKKIKIGFRESDYEESSLKVKEIIGDEYFDLVERAKSVHDMGLLSNIIGNSKYLCEARVEAYENHHKDLLKIKELLKKYDKKAYNDMFRKMTDKNYSAYVGSVNSNIAKERRSVDKRKIEDLYKYIEDTALKNIPDDNKDKIEILEKIKLGEFLKKQLTASNGVIPNQLQSRELRAILKKAENYLPFLKEKGEKNLTVSEMIIQLFEFQIPYYVGPLDKNPKKDNKANSWAKIKQGGRILPWNFEDKVDVKGSRKEFIEKMVRKCTYISDEHTLPKQSLLYEKFMVLNEINNIKIDGEKISVEAKQKIYNDLFVKGKKVSQKDIKKELISLNIMDKDSVLSGTDTVCNAYLSSIGKFTGVFKEEINKQSIVDMIEDIIFLKTVYGDEKRFVKEEIVEKYGDEIDKDKIKRILGFKFSNWGNLSKSFLELEGADVGTGEVRSIIQSLWETNFNLMELLSSRFTYMDELEKRVKKLEKPLSEWTIEDLDDMYLSSPVKRMIWQSMKIVDEIQTVIGYAPKRIFVEMTRSEGEKVRTKSRKDRLKELYNGIKEDSKQWVKELDSKDESYFRSKKMYLYYLQKGRCMYSGEVIELDKLMDDNLYDIDHIYPRSFVKDDSLDNLVLVKKEINNRKQNDPITPQIQASCQGFWKILHDQGFMSNEKYSRLTRKTQEFSDEEKLSFINRQIVETGQATKCMAQILQKSMGEDVDVVFSKARLVSEFRHKFELFKSRLINDFHHANDAYLNIVVGNSYFVKFTRNPANFIKDARKNPDNPVYKYHMDRFFERDVKSKSEVAWIGQSEGNSGTIVIVKKTMAKNSPLITKKVEEGHGSITKETIVGVKEIKFGRNKVEKADKTPKKPNLQAYRPIKTSDERLCNILRYGGRTSISISGYCLVEYVKKRKTIRSLEAIPVYLGRKDSLSEEKLLNYFRYNLNDGGKDSVSDIRLCLPFISTNSLVKIDGYLYYLGGKNDDRIQLYNAYQLKMKKEEVEYIRKIEKAVSMSKFDEIDREKNPVLTEEKNIELYNKIQDKFENTVFSKRMSLVKYNKKDLSFGDFLKNKKSKFEEIDLEKQCKVLYNIIFNLSNLKEVDLSDIGGSKSTGKCRCKKNITNYKEFKLIQQSITGLYSCEKDLMTI

SEQ ID NO: 957 - protein, 1142 aa, Facklamia hominis
MYSVGLDIGIASCGYSIINDVNGNIVELGTLLFKSRNSDNNEERRTNRGSRRLINRRRTRLDDGKKLLAEKGFKQDSKLKHVCPYELRVKGLHEKLTQGEIYKVVLHILKKRGISYLDESDENSSGIDGASYKDQVNLNLNLQKELTPGQIQLKRLKENGRIKSGVTFENGYQLNVFSVSAYANELNKILTKQSEYYSEIDQIWIDRFTKNGYRKEAGLVYRKRPYYDGPGNEKNNSIYGRWANFKEDGHPKENIFDQLIGLDSVDSTQVRASASTLTAQKYNLLNDLNNLTIIEDDRKFTTDEKVSIINYLMTQDITRFGPKELAKFYQLEVDQIRGWRIDNKGNPEIHSLKVYRDWKKIFNTSSIDLTSIQTWVVDELANVITLNTEIPSTLATLKIKIPDIDQQILNFVENNFYELKKKTSKNSWHSFSLKTLNILIPELLNTSEEQNTILERLNLKFDLKNKYAEKNQIPVKELLEQIYNPTVTKSVHQSIKLFNEIIEKYGKNNISYVTIEMPRDKNDQDQKDTIKRINKLNSERKNDSEKYFLERSGWDTIRFESALKKPRFAEKLLFYYEQKGKCAYSGQDILAESLLNESCEVDHIIPLSISFDDSIHNKVLVTASSNQEKGQRTPYMAFIDGAKLGQSWDDFVAWVNSCGFHRKKVQNLLYEENIFNPDVQRGFVSRNLNDTRYASRIVLNAIQSFFYKQKDLTKVKVVNGSFTHTLRKKWGSSLDKNRDTYHHHAVDATLCAVTPFINIVKYEFFEEDGIKYMVDLTTGEKVAYSDYKKMKFYDKRAYVPIWDGFIKQLTPANLYPKIKFSHQVDSKWNRKISDATIYSTRKIVETKINKKGVAKETVKDIVIDKIKDIYTPEGWRKFKEKQDKLLMKNFDEKTYNKLIKIAKEYPEKKEVQTSNGKVSLVEVSPFKMYCEEQNVPAIRKYSKKGNGPYIRSLKFYDKELGKHINITKDSYGNDIERTIRNKKIILKNQNSWRTDVYYNSVNNCYELLGIKYCHLKFYRGKYGIPKSIYDELKKEDEISSESVFKFSLYRHDRVRFEKDGEYIEALFGSKNESNKNYLELSPIDKNKWLSKENVKFFGEVAASGRFIKGLKPGIKVIKQSTDYMGHVYAIHQEKLKFVLSDA

SEQ ID NO: 958 - protein, 1347 aa, Finegoldia magna
MKSEKKYYIGLDVGTNSVGWAVTDEFYNILRAKGKDLWGVRLFEKAKTAADTRTFRSGRRRNDRKGMRLQILREIFEDEIKKVDKDFYDRLDESKFWAEDKKVSGKYSLFNDKNFSDKQYFEKFPTIFHLRKYLMEEHGKVDIRYYFLAINQMMKRRGHFLIDGQISHVTDDKPLKEQLILLINDLLKIELEEELMDSIFEILADVNEKRTDKKNNLKELIKGQDFNKQEGNILNSIFESIVTGKAKIKNIISDEDILEKIKEDNKEDFVLTGDSYEENLQYFEEVLQENITLFNTLKSTYDFVILQSILKGKSTLSDAQVERYDEHKKDLEILKKVIKKYDEDGKLFKQVFKEDNGNGYVSYIGYYLNKNKKITAKKKISNIEFTKYVKGILEKQCDCEDEAVKYLLGKIEQENFLLKQISSINSVIPHQIHLFELDKILENLAKNYPSFNNKKEEFTKIEKIRKTFTFRIPYYVGPLNDYHKNNGGNAWIFRNKGEKIRPWNFEKIVDLHKSEEEFIKRMLNQCTYLPEETVLPKSSILYSEYMVLNELNNLRIKGKPLDTDVKLKLIEELFKKKTKVTLKSIRDYMIRNNFADKEDFDNSEKNLEIVSNMKSYIDFNNILGDKFELEMVEDLIEKITIHTGNKTLLKKYIEETYPDLSSSQIQKIINLKYKDWGRLSRKLLDGIKGRNKTDDVNTVINFMRNSSDNLMQIIEGKNYSFNEYIDNLRKKYIPQEISYEVVENLYVSPSVKKMIWQVIRVTEEITKVMGYDPDKIFIEMAKSEEEKKTTISRKNKLLDLYKAIKKDERDSQYEKLLTGLNKLDESELRSKKLYLYYTQMGRDMYTGEKIDLDKLFDSTHYDKDHIIPQSMKKDDSIINNLVLVNKNANQTTKGNIYPVPSSIRNNPDIYNYWKYLMEKEFISKEKYNRLIRNTPLTNEELGVFINRQLVETRQSTKAIKELFEKFYQKSKIIPVKASLASDLRKDMNTLKSREVNDLHHAHDAFLNIVAGDVWNREFTSNPINYVNENREGDKVKYSLSKYFTRPRKSKGKVIWTPEKGRKLIVDTLNKPSVLISNESHVKKGELFNATISGKKDYKKGKIYLPLKKDDRLKDVSKYGGYKAINGAFFFLVEHTKSKKRIRSIELFPLHLLSKFYEDKNTVLDYAINVLQLQDPKIIIDKINYRTEIIIDNFSYLISTKSNDGSITVKPNEQMYWRVDEISNLKKIENKYKKDAILTEEDRKIMESYIDKIYQQFKAGKYKNRRTTDTIIEKYEIIDLDTLDNKQLYQLLVAFISLSYKTSNNAVDFTVIGLGTECGKPRITNLPDNTYLVYKSITGIYEKRIRIK

SEQ ID NO: 959 - protein, 1348 aa, Finegoldia magna; identical to SEQ ID NO: 222

SEQ ID NO: 960 - protein, 1516 aa, Flavobacteriaceae bacterium
MLKQQKDKIIGMNKKILGLDLGTNSIGWALVKQDLENKYGEIIGCGSRIIPMSQDVLGKFDAGISISQTAERTNYRSVRKLIQRNTLRRERLHRVLHQLDFLPKHYNDSIDFEKKLGQFKTDKETKLNYFVNQHGKHEFLFKDSFNEMVKEFKEEQPELFYIKNNGKETKIPYDWTIYYLRKKALSKKISKEELSWLVLNFNQKRGYYQLRGEIDEEKEKNKRYEKLYVSEVVKTNNTIKKTGEYLYDIYFDNGWKYEKQTTKPQDWLHKHKEFIITTTTLKNGETKRTFKTVDSEKDWIAIKSKTEQDIKESNKTVGAFIYDTLLKNPTQKIRGSLVKTIERKFYREEFEKILKEQIKHRPEINVNTAIGKENYTKCVTELYPRNEAHANNILTNDFNYLFTKDILFYQRPLKSKKSEIANCQYEYRTYIKKKEKTGKEERVKQPLKATPKSHPLFQEFRLWQFIHNLKIYIRETTVGNKPLFDVDITDTFFTSENDWATLFEYLNNKKEIEQKHVLEYLVSKKIISKSEKTDYRWNYVEDKKYPGNETRVDFINRLKKVENLNVDEFLTSELEFKLWHIIYSVTDKNEYEKALENFAIRQNIDKDSFVNSFKKFPPFKSDYGAYSTKAIKKLLPLMRLGKFWDGSEIPKVVVEKITDIKTRLTSVNYDESLFKKDEKKILETIVDDITPKQLLKSFVKLKGKNHLAGLNTYQACYLVYERHSESSDITQWENPDDIDSFLNHFKQHSLRNPIVEQVVTETLRTVRDIWKYYGNGSPNYFNEIHIELGREMKNPADKRKQMSAKINENENTNQRIKGILQELMNDGVQDIKPYSPSQQEILKIYEEGISQNPNVDYSKVSEDEITKIKKSNNPTLKEIQRYKLWLEQKYISPYTGKPIPLSELFTPAYQIEHIIPQSRYFDNSLSNKIICESEVNEDKSNKTAYEYLKTNGGSIVHGHHLLSLKEYEDHCQHYFKKNRTKLKNLLSEEIPEGFINRQLNDSRYISKLIKGLLSNIVREENEQEATSKNIVPVTGSITSKLKQDWGLNDKWNEIIAPRFKRLNKMTNSNDFGYFDEKINTFRIQVPDAISRGFNKKRIDHRHHTLDALVIACCTKKHIQYLNSLNNEIIKHELKPSILIKNAQGDYTKHFMLPWNNFPIDCKNAIENTIVSFKQNLRVINKTSNKYQSYKDENGNLRLGKDGKPKKGLTKQTKGNNWAVRKAMHEDTFYGEIVDGENKGKLKIKTLLDTSFDVKKIEDKVLDKSIRTILINYLKQDKYKNLSKPHEEAFSPNGIIEMNKNIISLNNNIPHKPIKRVTLKHEKGKKFSIKTLLDKKTKFAKSATGTNVFFCIYKNINGKIKYHTPSFEEIIEIQKQEFEIKYKSKLNVPETLFDKKESFELLFYLQPNDLVYLPNDEELKNRQLIDFNNLNKKQIKRIYKFTDGSGTTANFIPYQVAKVIFNLNKKEQAKSSFKYPIQNEFGVGSPQSKNQKSIEGILIKERCIKLKIDRLGNISKA

SEQ ID NO: 961 - protein, 1629 aa, unidentified
  REGION 1..1629: note = cf
  source 1..1629: note = Francisella sp.
MNFKILPIAIDLGVKNTGVFSAFYQKGTSLERLDNKNGKVYELSKDSYTLLMNNRTARRHQRRGIDRKQLVKRLFKLIWTEQLNLEWDKDTQQAISFLFNRRGFSFITDGYSPEYLNIVPEQVKAILMDIFDDYNGEDDLDSYLKLATEQESKISEIYNKLMQKILEFKLRKLCTDIKDDKVSTKTLKEITSYEFELLADYLANYSEILKTQKFSYTDKQGNLKELSYYHHDKYNIQEFLKRHATINIQILDTLLTDDLDIWNFNFEKFDFDKNEEKLQNQEDKDHIQAHLHHFVFAVNKIKSEMASGGRHRSQYFQEITNVLDENNHQEGYLKNFCENLHNKKYSNLSVKNLVNLIGNLSNLELKPLRKYFNDKIHAKADHWDEQKFTETYCHWILGEWRVGVKDQDKKDGAKYSYKDLCNELKQKVTKAGLVDFLLELDPCRTIPPYLDNNNRKPPKCQSLILNPKFLDNQYPNWQQYLQELKKLQSIQNYLESFETDLKVLKSSKDQPYFVEYRSSNQQIASGQRDYKDLDARILQFIFDRVKASDELLLNEIYFQAKKLKQKASSELEKLESSKKLDEVIANSQLSQILKSQHTNGIFEQGTFLHLVCKYYKQRQRARDSRLYIMPEYRYDKKLHKYNNTGRFDDDNQLLTYCNHKPRQKRYQLLNDLAGVLQVSPNFLKDKIGSDDDLFISKWLVEHIRGFKKACEDSLKIQKDNRGLLNHKINIARNTKGKCEKEIFNLICKIEGSEDKKGNYKHGLAYELGVLLFGEPNEASKPEFDRKIKKFNSIYSFAQIQQIAFAERKGNANTCAVCSADNAHRMQQIKITEPVEDNKDKIILSAKAQRLPAITTRIVDGAVKKMATILAKNIVDDNWQNIKQVLSAKHQLHIPIITESNAFEFEPALADVKGKSLKDRRKKALERISPENIFKDKNNRIKEFAKGISAYSGANLTDGDFDGAKEELDHIIPRSHKKYGTLNDEANLICVTRGDNKNKGNRIFCLRDLANNYKLKQFETTDDLEIEKKIADTIWDANKKDFKFGNYRSFINLTPQEQKAFRHALFLADENPIKQAVIRAINNRNRTFVNGTQRYFAEVLANNIYLRAKKENLNTDKISFDYFGIPTIGNGRGIAEIRQLYEKVDSDIQAYAKGDKPQASYSHLIDAMLAFCIAADEHRNDGSIGLEIDKNYSLYPLDKNTGEVFTKDIFSQIKITDNEFSDKKLVRKKATEGFNTHRQMTRDGIYAENYLPILIHKELDEVRKGYTWKNSEEIKIFKGKKYDIQQLNNLLYCLKFVDKPISIDIQISTLEELRNILTTNNIAATAEYYYINLKTQKLHEYYIENYNTALGYKKYTKEMEFLRSLAYRSERVKIKSIDDVKQVLDKDSNFIIGKITLPFKKEWQRLYREWQNITIKDDYEFLKSFFNVKSITKLHKKVRKDFSLPISTNEGKFLVKRKTWDNNFIYQILNDSDSRVDGTKPFIPAFDISKNEIVEAIIDSFTSKNIFWLPKNIELQKVDNKNIFAIDTSKWFEVETPSDLRDIGVATIQYKIDNNSRPKVRVKLDYVIDDDSKINYFTNHSLLKSRYPDKVLEILKQSTIIEFESSGFNKTIKEMLGMTLAGIYNETSNN

SEQ ID NO: 962 - protein, 1646 aa, unidentified
  REGION 1..1646: note = cf
  source 1..1646: note = Francisella sp.
MNIKILPIAIDLGAKNTGVFSAFYQKGTSLESLDNKNGKVYELSKDSYTLLMNNRTARRHQRRGIDRKQLVKRLFKLIWTKQLNLEWNKDTQQTISFLLNRRGFSFITDGYSPEYLNIAPEAVKAILMSILDDYNGEDDLDSYLQSATENDSKIDELYNKLLQKALEFKLRKLCIDIKEDKVTTKTLKELSNTEFKLLANYLVDYDRILRTQKFSYTDKQGNLRELNYYHHDKYNIQEFLKRNIIINDVILEKLTDDLDIWNLNFDKFDFEKNLEKLENQEDKDYLQTHLHHFVFAVNKIKSEMASGGRHRSQYFQEITNVLVENNHQEGYLKNFCENLHNKKYSNLSVKNLVNLIGNLSNLELKPLRKYFNDKIHAKADYWDEQKFAETYSDWILGEWRVGAKDKDKKDGAKYSYKNLCDELKQKVGINQDGIINQTKSDFVDFLLELDPCRTIPPYLDNNNRKPPKCQSLILNPKFLDNKYPNWQQYLQELKKLQTVQNYLGNFEIDLKDLKSSKEQPYFVKYKSLNQQIASGQRDYKDLDARVLQFIFDRVKASDELLLNEIYSHAKKLKQNTSSELEKLELCKKLDEVIANSQLSQILKSQHVNGIFEQGTFLHLVCKYYKQRQRARDSRLYIMPEYRYDKKLDKYNNTGRFDDDNQLLTYCNHKPRQKRYQLLNDLAGVLQVSPNFLKDKIGSDDDLFISKWLVEHIRGFKKACEDSLKIQKDNRGLLNHKINIARNTKGKCEKEIFNLICKIEGSEDKKGNYKHGLAYELGVLLFGEPNQASKLEFDRKIKKFNSIYSFAQIQQIAFAERKGNANTCAVCSADNAHRMQQIKVAKPVEGNKDNIILSAKAQRLPAIPTRIVDGAVKKIATILARNIVDDNWDNIKQALSNNQQLHVPIITESNAFEFEPALADIKGKSLKDKRKKALERIDPENVFKDKNNRIKEFAKGISAYSDANLANGDFDGAKEELDHIIPRSHKKYGTLNDEANLICVTREDNQNRGNKAVFLYDLKPNYKLKQFNTTDDLEIEKKIADTIWDASKQDFKFGNYRSFINLTPQEQIAFRHALFLADKNPIKKAVIRAIDNRNRTFVNGTQRYFAEVLANNIYLRAKKENLATNRITFDYFGIETTNSNGRGIADVRKLYEKVDSDIQAYAKGDKPQDSYSHLIDAMIAFCVAADEHKNEGSIGLKMGNQYGLFPTPDKYDENTGEIISWHNDDIFRKIKVSDNQFSDKKLVRKKATEGFNTHRQMTRDGIYGESYLPILIHKNLNEVRKGYNWENSEEIKIFKGKKYDIQQLNNLVYCLKFVDKPISIDIQITTLEELRNILETNNISTTAEYYYINLKTQKLHEYYIENYNTALGYKKYTKEMEFLRSLAYRTERVKIKSIDDVSMILAKDSNFKAGKIELPFKTEWQRLYLEWQNTTIKDNHEFLKSYFSVKNATKQHKKVRKDFSLPISTNEGKLLVKRKTWDNNFIYQILNDSDSRADGTKPFIPAFDISKNEIVETIIKSFTSKNIFWLPKNIELQKVDNKSIFAIDTSRWFEVETPKDLIEIGVSTIQYKIDNNSRPKVRVKLDYVMDDDSKINYFMNHSLLKSRYPDKVLEILKQSTIIEFESSGFNKTIKEMLGMTLAGIYNETSNN

SEQ ID NO: 963 - protein, 1629 aa, unidentified
  source 1..1629: note = Francisella novicida
MNFKILPIAIDLGVKNTGVFSAFYQKGTSLERLDNKNGKVYELSKDSYTLLMNNRTARRHQRRGIDRKQLVKKLFKLIWTEQLNLEWDKDTQQAISFLFNRRGFSFITDGYSPEYLNIVPEQVKAILMDIFDDYNGEDDLDSYLKLATEQESKISEIYNKLMQKILEFKLRKLCTDIKDDKVSTKTLKEITSYEFELLADYLANYSESLKTQKFSYTDKQGNLKELSYYHHDKYNIQEFLKRHATINDEILDTLLTDDLDIWNFNFEKFDFDKNEEKLQNQEDKDHTQAHLHHFVFAVNKIKSEMASGGRHRGQYFQEITNVLDENNHQEGYLKNFCENLHNKKYSNLSVKNLVNLIGNLSNLELKPLRKYFNDKIHAKADHWDEQKFTETYCHWILGEWRVGLKDQDKKEGAKYSYKDLCNELKQKVTNAGLIDFLLELDPCRTIPPYLDNNNRKPPKCQSLILNPKFLDNQYPNWQQYLQELKKLQIIQDYLESFETDLKVLKSSKDQPYFVEYKSSNQQIASGQRDYKDLDARILQFIFDRVKASDELLLNEIYFQAKKLKQKASSELEKLESSKKLDEVIANSQLSKILKSQHTNGIFEQGTFLHLVCKYYKQRQRARDSRLYIMPEYRYDKKLDKYNNTGRFDDDNQLLTYCNHKPRQKRYQLLNDLAGVLQVSPNFLKDKIGSDDDLFISKWLVEHIRGFKKACEDSLKIQKDNRGLLNHKINIARNTKGKCEKEIFNLICKIEGSEDKKGNYKHGLAYELGVLLFGEPNEASKPEFDRKIKKFNSIYSFAQIQQIAFAERKGNANTCAVCSADNAHRMQQIKITEPVEDNKDKIILSAKAQRLPAIPTRIVDGAVKKMATILAKNIVDDNWQNIKQVLSAKHQLHIPIITESNAFEFEPALADVKGKSLKDRRKKALERISPENIFKDKNNRIKEFAKGISAYSGANLTDGDFDGAKEELDHIIPRSHKKYGTLNDEANLICVTRDDNKNKGNRIFCLHDLANNYKLKQFETTDDLEIEKKIADTIWDASKKDFKFGNYRSFINLTPQEQKAFRHALFLADENPIKQAVIRAINNRNRTFVNGTQRYFAEVLANNIYLRAKKENLNTDKISFDYFGIPTIGNGRGIAEIRQLYEKVDSDIQVYAKGDKPQASYSHLIDAMLAFCIAADEHRNDGSIGLEIDKNYSLYPLDKNTGEVFTKDIFSQIKITDNEFSDKKLVRKKATEGFNTHRQMTRDGIYAENYLPILIHKELDEVRKGYTWKNSEEIKIFKGKKYDIQQLNNLLYCLKFVDKPISIDIQISTLEELRNILTTNNIAATAEYYYINLKTQKLHEYYIENYNTALGYKKYTKEMEFLRSLAYRSERVKIKSIDDVKQVLDKDSNFIIGKITLPFKKEWQRLYREWQNTTIKDDYEFLKSFFNVKSITKLHKKVRKDFSLPISTNEGKFLVKRKTWDNNFIYQILNDSDSRVDGTKPFIPAFDISKNEIVEAIIDSFTSKNIFWLPKNIELQKVDNKNIFAIDTSKWFEVETPSDLRDIGVATIQYKIDNNSRPKVRVKLDYVIDDDSKINYFTNHSLLKSRYPDKVLEILKQSTIIEFESSGFNKTIKEMLGMTLAGIYNETSNN

SEQ ID NO: 964 - protein, 1629 aa, unidentified
  source 1..1629: note = Francisella novicida
MNFKILPIAIDLGVKNTGVFSAFYQKGTSLERLDNKNGKVYELSKDSYTLLMNNRTARRHQRRGIDRKQLVKRLFKLIWTEQLNLEWDKDTQQAISFLFNRRGFSFITDGYSPEYLNIVPEQVKAILMDIFDDYNGEDDLDSYLKLATEQESKISEIYNKLMQKILEFKLMKLCTDIKDDKVSTKTLKEITSYEFELLADYLANYSESLKTQKFSYTDKQGNLKELSYYHHDKYNIQEFLKRHATINDRILDTLLTDDLDIWNFNFEKFDFDKNEEKLQNQEDKDHIQAHLHHFVFAVNKIKSEMASGGRHRSQYFQEITNVLDENNHQEGYLKNFCENLHNKKYSNLSVKNLVNLIGNLSNLELKPLRKYFNDKIHAKADHWDEQKFTETYCHWILGEWRVGVKDQDKKDGAKYSYKDLCNELKQKVTKAGLVDFLLELDPCRTIPPYLDNNNRKPPKCQSLILNPKFLDNQYPNWQQYLQELKKLQSIQNYLDSFETDLKVLKSSKDQPYFVEYKSSNQQIASGQRDYKDLDARILQFIFDRVKASDELLLNEIYFQAKKLKQKASSELEKLESSKKLDEVIANSQLSQILKSQHTNGIFEQGTFLHLVCKYYKQRQRARDSRLYIMPEYRYDKKLHKYNNTGRFDDDNQLLTYCNHKPRQKRYQLLNDLAGVLQVSPNFLKDKIGSDDDLFISKWLVEHIRGFKKACEDSLKIQKDNRGLLNHKINIARNTKGKCEKEIFNLICKIEGSEDKKGNYKHGLAYELGVLLFGEPNEASKPEFDRKIKKFNSIYSFAQIQQIAFAERKGNANTCAVCSADNAHRMQQIKITEPVEDNKDKIILSAKAQRLPAIPTRIVDGAVKKMATILAKNIVDDNWQNIKQVLSAKHQLHIPIITESNAFEFEPALADVKGKSLKDRRKKALERISPENIFKDKNNRIKEFAKGISAYSGANLTDGDFDGAKEELDHIIPRSHKKYGTLNDEANLICVTRGDNKNKGNRIFCLRDLADNYKLKQFETTDDLEIEKKIADTIWDANKKDFKFGNYRSFINLTPQEQKAFRHALFLADENPIKQAVIRAINNRNRTFVNGTQRYFAEVLANNIYLRAKKENLNTDKISFDYFGIPTIGNGRGIAEIRQLYEKVDSDIQAYAKGDKPQASYSHLIDAMLAFCIAADEHRNDGSIGLEIDKNYSLYPLDKNTGEVFTKDIFSQIKITDNEFSDKKLVRKKAIEGFNTHRQMTRDGIYAENYLPILIHKELNEVRKGYTWKNSEEIKIFKGKKYDIQQLNNLVYCLKFVDKPISIDIQISTLEELRNILTTNNIAATAEYYYINLKTQKLHEYYIENYNTALGYKKYSKEMEFLRSLAYRSERVKIKSIDDVKQVLDKDSNFIIGKITLPFKKEWQRLYREWQNTTIKDDYEFLKSFFNVKSITKLHKKVRKDFSLPISTNEGKFLVKRKTWDNNFIYQILNDSDSRVDGTKPFIPAFDISKNEIVEAIIDSFTSKNIFWLPKNIELQKVDNKNIFAIDTSKWFEVETPSDLRDIGVATIQYKIDNNSRPKVRVKLDYVIDDDSKINYFTNHSLLKSRYPDKVLEILKQSTTIEFESSGFNKTIKEMLGMTLAGIYNETSNN

SEQ ID NO: 965 - protein, 244 aa, Francisella tularensis
ARKQNSEIYNKLMQKILEFKLRKLCTDIKDDKVSTKTLKEITSYEFELLADYLANYSESLKTQKFSYTDKQGNLKELSYYHHDKYNIQEFLKRHATINDEILDTLLTDDFDIWNFNFEKFDFDKNEEKLQNQEDKDHTQAYLHHFVFAVNKIKSEMASGGRHRSQYFQEITNVLDENNHQEGYLKNFCENLHNKKYSNLSVKNLVNLVGNLSNLELKPLRKYFNDKNLIIGMSKSLQKLIATGY

SEQ ID NO: 966 - protein, 501 aa, Francisella tularensis
MEIEKKIADTIWDASKQDFKFGNYRSFINLTPQEQKAFRYALFLADENSIKQAVIRAINNRNRTFVNGTQRYFAEVLANNIYLRAKKENLNTDKISFDYFGIPTIGNGRGIADIRQLYEKVDSDIQAYAKGDKPQASYSHLIDAMIAFCVAADEHRNDGSIGLEIDKNYSLYLLDKNTGEVFTKDIFSQIKITDNEFSDKKLVRKKATEGFNTHRQMTRDGIYAENYLPILIHKELDEVRKGYTWGNSEELKIHKGKKYNIQQLNNIVYCLKFIDKSISIDIQISTLEELRNILTTNNIAATAEYYYINLKNQKLHEYYIENYNTALDYKKYSKEMEFLRSLAYRSERVKIKSIDDVKQVLDKDSNFIIGKITLPFKKEWQRLYLEWQNTTIKDDYEFLKSFFNVKSITKLHKKVRKDFSLPISTNEGKFLVKRKTWDNNFIYQILNDSDSRVDGTKPFIPAFDISKNEIVEAIIDSFTSKNIFWLPKNIELQNVDKIFLL

SEQ ID NO: 967 - protein, 158 aa, Francisella tularensis
MIDFLLELDPCITIPPYLDNNNRKPPKCQSLILNPKFLDNQYPNWQQYLQELKKLQSIQDYLDSFETDLKDLKSSKDQPYFVEYKSSNQQMASGQRDYKDLDARILQFIFDRVKASDELLLNEIYFQAKKLKQKASSELEKLESSKKLDEVIANSQLS

SEQ ID NO: 968 - protein, 878 aa, Francisella tularensis
MLNDLAGVLQVSRNQLLSSVEEWFQQAQRVGEISKSQDEQIFEWLKSFKIASYCKAAVEMQKQYRGTLKNAIQTAIFRQSENINKNKNKNKNTGNQQQALSENSKDVKSLTADEKKLLKLIENIAKASQKIGESLGLNDKQIKKFNSIYNFAQIQQIAFAERKGNANTCAVYSADNAHRMQQIKITELVEDNKDNIILSAKAQRLPAIPTRIVDGAVKKMATILAKNIVDDNWQNIKQVLSAKHQLHIPIITESNAFEFEPALADVKGKSLKDRRKKALERISPENIFKDKNNRIKEFAKGISAYSGANLTDGDFDGAKEELDHIIPRSYKKYGTLNDEVNLICVTRDDNKNKGKRIFCLNDLANNYKLKQFETTDDLEIEKKIADTIWDASKQDFKFGNYRSFINLIPQEQKAFRYALFLADENSIKQAVIRAINNRNRTFVNGTQRYFAEVLANNIYLRAKKENLNTDKISFDYFGIPTIGNGRGIADIRQLYEKVDSDIQAYAKGDKPQASYSHLIDAMIAFCVAADEHRNDGSIGLEIDKNYSLYPLDKNTGEVFTKDIFSQIKITDNEFSDKKLVRKKATEGFNTHRQMTRDGIYAENYLPILIHKELDEVRKGYTWGNSEELKIHKGKKYNIQQLNNIVYCLKFIDKSISIDIQISTLEELRNILTTNNIAATAEYYYINLKNQKLHEYYIENYNTALDYKKYSKEMEFLRSLAYRSERVKIKSIDDVKQVLDKDSNFIIGKITLPFKKEWQRLYLEWQNTTIKDDYEFLKSFFNVKSINKLHKKVRKDFSLPISTNEGKFLVKRKTWDNNFIYQILNDSDSRVDGTKPFIPAFDISKNEIVEAIIDSFTSKNIFWLPKNIELQKVDKIFLL

SEQ ID NO: 969 - protein, 292 aa, Francisella tularensis
MLNDLAGVLQVSRNQLLSSVEEWFQQAQRVGEISKSQDEQIFEWLKSFKIASYCKAAVEMQKQYRGTLKNAIQTAIFRQSENINKNKNKNTGNQQQALSENSKDVKSLTADEKKLLKLIENIAKASQKIGESLGLNDKQIKKFNSIYNFAQIQQIAFAERKGNANTCAVYSADNAHRMQQIKITELVEDNKDNIILSAKAQRLPAIPTRIVDGAVKKMVTILAKNIVDDNWQNIKQVLSAKHQLHIPIITESNAFEFEPALADVKGKSLKDRRKKALERISPENIFKDKNIC

SEQ ID NO: 970 - protein, 53 aa, Francisella tularensis
MNHSLLKSRYPDKVLEILKQSTIIEFESSGFNKTIKEMLGMTLAGIYNETSNN

SEQ ID NO: 971 - protein, 393 aa, Francisella tularensis
MNVKILPIAIDLDVKNTGVFSAFYQKGTSLEKLDNKNGKVYELSKDSYTLLMNNRTAQRHQRRGIDRKQLVKRLFKLVWTEQLNLEWDKDTQQAISFLFNRRGFSFITDGYSTEYLNIVPEQVKAILMDIFDDYNGEDDLDSYLKLATEQESKISEIYNKLMQKILEFKLRKLCTDIKDDKVSTKTLKEITSYEFELLADYLANYSESLKTQKFSYTDKQGNLKELSYYHHDKYNIQEFLKRHATINDEILDTLLTDDFDIWNFNFEKFDFDKNEEKLQNQEDKDHTQAYLHHFVFAVNKIKSEMASGGRHRSQYFQEITNVLDENNHQEGYLKNFCENLHNKKYSNLSVKNLVNLVGNLSNLELKPLRKYFNDKNLIIGMSKSLQKLIATGY

SEQ ID NO: 972 - protein, 1629 aa, Francisella tularensis
MNVKILPIAIDLGVKNTGVFSAFYQKGTSLERLDNKNGKVYELSKDSYTLLMNNRTARRHQRRGIDRKQLVKRLFKLIWTEQLNLEWDKDTQQAISFLFNRRGFSFITDGYSPEYLNIVPEQVKAILMDIFDDYNGEDDLDSYLKLATEQESKISEIYNKLMQKILEFKLRKLCTDIKDDKVSTKTLKEITSYEFELLADYLANYSEILKTQKFSYTDKQGNLKELSYYHHDKYNIQEFLKRHATINDEILDTLLTDDLDIWNFNFEKFDFDKNEEKLQNQEDKDHTQAHLHHFVFAVNKIKSEMASGGRHRGQYFQEITNVLDENNHQEGYLKNFCENLHNKKYSNLSVKNLVNLIGNLSNLELKPLRKYFNDKIHAKADHWDEQKFTETYCHWILGEWRVGVKDQDKKDGAKYSYKDLCNELKQKVTKAGLVDFLLELDPCRTIPPYLDNNNRKPPKCQSLILNPKFLDNQYPNWQQYLQELKKLQSIQNYLESFETDLKVLKSSKDQPYFVEYKSSNQQIASGQRDYKDLDARILQFIFDRVKASDELLLNEIYFQAKKLKQKASSELEKLESSKKLDEVIANSQLSQILKSQHTNGIFEQGTFLHLVCKYYKQRQRARDSRLYIMPEYRYDKKLDKYNNTGRFDDDNQLLTYCNHKPRQKRYQLLNDLAGVLQVSPNFLKDKIGSDDDLFISKWLVEHIRGFKKACEDSLKIQKDNRGLLNHKINIARNTKGKCEKEIFNLICKIEGSEDKKGNYKHGLAYELGVLLFGEPNEASKPEFDRKIKKFNSIYSFAQIQQIAFAERKGNANTCAVCSADNAHRMQQIKITEPVEDNKDKIILSAKAQRLPAIPTRIVDGAVKKMATILAKNIVDDNWQNIKQVLSAKHQLHIPIITESNAFEFEPALADVKGKSIKDRRKKALERISPENIFKDKNNRIKEFAKGISAYSGDNLASGDFDGAKEELDHIIPRSHKKYGTLNDEANLICVTRDDNKNKGNRIFCLHDLANNYKLKQFETTDDLEIEKKIADTIWDASKKDFKFGNYRSFINLTPQEQKAFRHALFLADENPIKQAVIRAINNRNRTFVNGTQRYFAEVLANNIYLRAKKENLNTDKISFDYFGIPTIGNGRGIVEIRQLYEKVDSDIQAYAKGDKPQASYSHLIDAMLAFCIAADEHRNDGSIGLEIDKNYSLYPLDKNTGEVFTKDIFSQIKITNNEFSDKKLVRKKATEGFNTHRQMTRDGIYAENYLPILIHKELDEVRKGYTWGNSEELKIHKGKKYDIQQLNNLVYCLKFIDKSISIDIQISTLEELRNILTTNNIATTAEYYYINLKTQKLHEYYIENYNTALGYKKYTKEMEFLRSLAYRSERVKIKSIDDVKQVLDKDSNFIIGKITLPFKKEWQRLYREWQNTTIKDDYEFLKSFFNVKSITKLHKKVRKDFSLPISTNEGKFLVKRKTWDNNFIYQILNDSDSRVDGTKPFIPAFDISKNEIVEAIIDSFTSKNIFWLPKNIELQKVDNKNIFAIDTSKWFEVETPSDLRDIGVATIQYKIDNNSRPKVRVKLDYVIDDDSKINYFTNHSLLKSRYPDKVLEILKQSTIIEFESSGFNKTIKEMLGMTLAGIYNETSNN

SEQ ID NO: 973 - protein, 285 aa, Francisella tularensis
MTRDGIYAENYLPILIHKELDEVRKGYTWGNSEELKIHKGKKYNIQQLNNIVYCLKFIDKSISIDIQISTLEELRNILTTNNIAATAEYYYINLKNQKLHEYYIENYNTALDYKKYSKEMEFLRSLAYRSERVKIKSIDDVKQVLDKDSNFIIGKITLPFKKEWQRLYLEWQNTTIKDDYEFLKSFFNVKSITKLHKKVRKDFSLPISTNEGKFLVKRKTWDNNFIYQILNDSDSRVDGTKPFIPAFDISKNEIVEAIIDSFTSKNIFWLPKNIELQKVDKIFLL

SEQ ID NO: 974 - protein, 1323 aa, Fructobacillus fructosus
MVYDVGLDIGTGSVGWVALDENGKLARAKGKNLVGVRLFDTAQTAADRRGFRTTRRRLSRRKWRLRLLDELFSAEINEIDSSFFQRLKYSYVHPKDEENKAHYYGGYLFPTEEETKKFHRSYPTIYHLRQELMAQPNKRFDIREIYLAIHHLVKYRGHFLSSQEKITIGSTYNPEDLANAIEVYADEKGLSWELNNPEQLTEIISGEAGYGLNKSMKADEALKLFEFDNNQDKVAIKTLLAGLTGNQIDFAKLFGKDISDKDEAKLWKLKLDDEALEEKSQTILSQLTDEEIELFHAVVQAYDGFVLIGLLNGADSVSAAMVQLYDQHREDRKLLKSLAQKAGLKHKRFSEIYEQLALATDEATIKNGISTARELVEESNLSKEVKEDTLRRLDENEFLPKQRTKANSVIPHQLHLAELQKILQNQGQYYPFLLDTFEKEDGQDNKIEELLRFRIPYYVGPLVTKKDVEHAGGDADNHWVERNEGFEKSRVTPWNFDKVFNRDKAARDFIERLTGNDTYLIGEKTLPQNSLRYQLFTVLNELNNVRVNGKKFDSKTKADLINDLFKARKTVSLSALKDYLKAQGKGDVTITGLADESKFNSSLSSYNDLKKTFDAEYLENEDNQETLEKIIEIQTVFEDSKIASRELSKLPLDDDQVKKLSQTHYTGWGRLSEKLLDSKIIDERGQKVSILDKLKSTSQNFMSIINNDKYGVQAWITEQNTGSSKLTFDEKVNELTTSPANKRGIKQSFAVLNDIKKAMKEEPRRVYLEFAREDQTSVRSVPRYNQLKEKYQSKSLSEEAKVLKKTLDGNKNKMSDDRYFLYFQQQGKDMYTGRPINFERLSQDYDIDHIIPQAFTKDDSLDNRVLVSRPENARKSDSFAYTDEVQKQDGSLWTSLLKSGFINRKKYERLTKAGKYLDGQKTGFIARQLVETRQIIKNVASLIEGEYENSKAVAIRSEITADMRLLVGIKKHREINSFHHAFDALLITAAGQYMQNRYPDRDSTNVYNEFDRYTNDYLKNLRQLSSRDEVRRLKSFGFVVGTMRKGNEDWSEENTSYLRKVMMFKNILTTKKTEKDRGPLNKETIFSPKSGKKLIPLNSKRSDTALYGGYSNVYSAYMTLVRANGKNLLIKIPISIANQIEVGNLKINDYIVNNPAIKKFEKILISKLPLGQLVNEDGNLIYLASNEYRHNAKQLWLSTTDADKIASISENSSDEELLEAYDILTSENVKNRFPFFKKDIDKLSQVRDEFLDSDKRIAVIQTILRGLQIDAAYQAPVKIISKKVSDWHKLQQSGGIKLSDNSEMIYQSATGIFETRVKISDLL

SEQ ID NO: 975 - protein, 1367 aa, Fusobacterium sp.
MKKQKFSDYYLGFDIGTNSVGWCVTDLDYNVLRFNKKDMWGSRLFDEAKTAAERRVQRNSRRRLKRRKWRLNLLEEIFSDEIMKIDSNFFRRLKESSLWLEDKNSKEKFTLFNDDNYKDYDFYKQYPTIFHLRDELIKNPEKKDIRLIYLALHSIFKSRGHFLFEGQNLKEIKNFETLYNNLISFLEDNGINKSIDKDNIKKLEKIICDSGKGLKDKEKEFKEIFNSDKQLVAIFKLSVGSSVSLNDLFDTDEYKKEEVEKEKISFREQIYEDDKPIYYSILGEKIELLDIAKSFYDFMVLNNILSDSNYISEAKVKLYEEHKKDLKNLKYIIRKYNKENYDKLFKDKNENNYPAYIGLNKEKGKKEVVEKSGLKIDDLIKVIKGYLPKPERIEEKDKTIFNEILNKIELKTILPKQRISDNGTLPYQIHEVELEKILENQSKYYDFLNYEENGVSTKDKLLKTFKFRIPYYVGPLNSYHKDKGGNSWIVRKEEGKILPWNFEQKVDIEKSAEEFIKRMTNKCTYLNGEDVIPKDSFLYSEYIILNELNKVQVNDEFLNEENKRKIIDELFKENKKVSEKKFKEYLLVNQIANRTVELKGIKDSFNSNYVSYIKFKDIFGEKLNLDIYKEISEKSILWKCLYGDDKKIFEKKIKNEYGDILNKDEIKKINSFKFNTWGRLSEKLLTGIEFINLETGECYSSVMEALRRTNYNLMELLSSKFTLQESIDNGNKEMNEVSYRDLIEESYVSPSLKRAILQTLKIYEEIKKITGRVPKKVFIEMARGGDETMKNKKIPARQEQLKKLYDSCGNDIANFSIDIKKMKSSLSSYDNNSLRQKKLYLYYLQFGKCMYTGREIDLDRLLQNNDTYDIDHIYPRSKVIKDDSFDNLVLVLKNENAEKSNEYPVKKEIQEKMKSFWRFLKEKNFISDEKYKRLTGKDDFELRGFMARQLVNVRQTTKEVGKILQQIEPEIKIVYSKAEIASSFREMFDFIKVRELNDTHHAKDAYLNIVAGNVYNTKFTEKPYRYLQEIKENYDVKKIYNYDIKNAWDKENSLEIVKKNMKKNTVNITRFIKEEKGQLFDLNPIKKGETSNEIISIKPKLYNGKEEKLNEKYGYYKSLNPAYFLYVEHKEKNKRIKSFERVNLVDVNNIKDEKSLVKYLIENKKLVEPRLIKKVYKRQVILINDYPYSIVALDSNKLMDFENLKPLFLENKYEKILKNVIKFLEDNQGKSEENYKFIYLKKKDRYEKNETLESVKDRYNLEFNEMYDKFLEKLDSKDYKNYINNKKYKNLLDVKEKFIKLNLFDKAFTLKSFLDLFNRKTMADFSKVGLTKYLGKIQKISSNVLSKNELYLLEESVTGLFVKKIKL

SEQ ID NO: 976 - protein, 1367 aa, Fusobacterium sp.
MKKQKFSDYYLGFDIGTNSVGWCVTDLDYNVLRFNKKDMWGSRLFDEAKTAAERRVQRNSRRRLKRRKWRLNLLEEIFSDEIMKIDSNFFRRLKESSLWLEDKNSKEKFTLFNDDNYKDYDFYKQYPTIFHLRDELIKNPEKKDIRLIYLALHSIFKSRGHFLFEGQNLKEIKNFETLYNNLISFLEDNGINKSIDKDNIKKLEKIICDSGKGLKDKEKEFKEIFNSDKQLVAIFKLSVGSSVSLNDLFDTDEYKKEEVEKEKISFREQIYEDDKPIYYSILGEKIELLDIAKSFYDFMVLNNILSDSNYISEAKVKLYEEHKKDLKNLKYIIRKYNKENYDKLFKDKNENNYPAYIGLNKEKGKKEVVEKSGLKIDDLIKVIKGYLPKPERIEEKDKIIFNEILNKIELKTILPKQRISDNGTLPYQIHEVELEKILENQSKYYDFLNYEENGVSTKDKLLKTFKFRIPYYVGPLNSYHKDKGGNSWIVRKEEGKILPWNFEQKVDIEKSAEEFIKRMTNKCTYLNGEDVIPKDSFLYSEYIILNELNKVQVNDEFLNEENKRKIIDELFKENKKVSEKKFKEYLLVNQIANRTVELKGIKDSFNSNYVSYIKFKDIFGEKLNLDIYKEISEKSILWKCLYGDDKKIFEKKIKNEYGDILNKDEIKKINSFKFNTWGRLSEKLLTGIEFINLETGECYSSVMEALRRTNYNLMELLSSKFTLQESIDNGNKEMNEVSYRDLIEESYVSPSLKRAILQTLKIYEEIKKITGRVPKKVFIEMARGGDETMKNKKIPARQEQLKKLYDSCGNDIANFSIDIKKMKSSLSSYDNNSLRQKKLYLYYLQFGKCMYTGREIDLDRLLQNNDTYDIDHIYPRSKVIKDDSFDNLVLVLKNENAEKSNEYPVKKEIQEKMKSFWRFLKEKNFISDEKYKRLTGKDDFELRGFMARQLVNVRQTTKEVGKILQQIEPEIKIVYSKAEIASSFREMFDFIKVRELNDTHHAKDAYLNIVAGNVYNTKFTEKPYRYLQEIKENYDVKKIYNYDIKNAWDKENSLEIVKKNMKKNTVNITRFIKEEKGQLFDLNPIKKGETSNEIISIKPKLYNGKEEKLNEKYGYYKSLNPAYFLYVEHKEKNKRIKSFERVNLVDVNNIKDEKSLVKYLIENKKLVEPRLIKKVYKRQVILINDYPYSIVALDSNKLMDFENLKPLFLENKYEKILKNVIKFLEDNQGKSEENYKFIYLKKKDRYEKNETLESVKDRYNLEFNEMYDKFLEKLDSKDYKNYINNKKYKNLLDVKEKFIKLNLFDKAFTLKSFLDLFNRKTMADFSKVGLTKYLGKIQKISSNVLSKNELYLLEESVTGLFVKKIKL

SEQ ID NO: 977 - protein, 1367 aa, Fusobacterium sp.
MKKQQFSDYYLGFDIGTNSVGWCVTDFNYNVLRFNKKDMWGSRLFDEAKTAAERRVQRNSRRRLKRRKWRLNLLEEIFSDEILKIDSNFFRRLKESSLWLEDKSSKEKFTLFNDDNYKDYDFYKQYPTIFHLRNELIKNPEKKDIRLVYLALHSIFKSRGHFLFEGQNLKDIKNFETLYNNLMAFLEDNDIYKNIDSSYIGNLENIICDSKKGLKDKEKEFKEIFNSDKQLVGFFKLSVGSSVSLNDLFDTDEYKKGEVEKEKISFREQIYEDDKPIYYSILGEKIEFLDIAKSFYDFMVLNNILADSQYISEAKVKLYDEHKRDLKNLKYIIRKYNKENYDKLFKDKNESNYSAYIGLNKEKGKKEVIEKSRLKIDDFAKIIKGYLPKAEKIDEKDRSIFNEILDKIELKTILPKQRISDNGTLPYQIHEAELEKILENQAKYYDFLNHEENGISTKDKLLMTFKFRIPYYVGPLNSYHKNKGGNSWIVRKEEGKILPWNFEQKVDIEKSAEEFIKRMTNKCTYLNGEDVIPKDSFLYSEYIILNELNKVQVNDEFLNKEIKKKIIEDLFKKSKKISEKNFREYLLVNQITNKTVELKGVKDAFNSNYVSYIKFKDIFGDKLNLDIYKEISEKSILWKCLYGDDKKIFEKKIKSVYGDILTKDEIKKINSFKFNTWGRLSEKLLTEIEFIDLETGECYSSVMDALRRTNYNLMELLSSKFTLQENIDNENKEVSEFSYRDLVEESYVSPSLKRAILQTLKIYEEIRKITGRIPKKVFIEMARGGDETMKNKKIPARQEQLKKLYDSCGKDISNFSIDIKEMKNSLNSYDNNSLRQKKLYLYYLQFGKCMYTGKEIDLNRLLQNNDTYDIDHIYPRSKVIKDDSFDNLVLVLKNENAEKSNEYPLKKEIQEKMKSFWKFLKEKNFISDEKYKRLTGKDEFELRGFMARQLVNVRQTTKEAGKILQQIEPEIKIVYSKAEIASSFREMFDFIKVRELNDTHHAKDAYLNIVAGNVYNTKFTEKPYRYLQEIKENYDVKKIYNYDIKNAWDKEKSLEIVKKNMEKNTVNITRFIKEEKGQLFDLNPIRKGETSNEIIAIKPKFYEGSTEKLNEKYGYYKSLNPAYFIYVEHKEKNKIIRSFERVNLVDVNKIKDEKSLIKYLIENKGLIEPKVIKKVYKRQVILINNFPYSIVALDSNKLMDFENLKPLFLERKYEKILKNAIKFLEDNQGKTEEYYKFLYLKKKDRNEKNETIDSVKERYNIEFNEMYDKFLEKLDSKDYKNYINNKKYSELVNVKEKFIKLNLFDKAFTLKSFLDLFNRKTMADFSKVGLTKYLGKIQKISSNVLSKNELHLLEESVTGLFVKKIKL

SEQ ID NO: 978 - protein, 1391 aa, Galbibacter sp.
MKTILGLDLGTNSIGWALVKEAENENEVSDIIKLGVRVNPLTVDELTNFEGGKAYSNNAERTLKRGARRNLQRYKLRRENLIEILLKNGLINKDTALTEVGKETTHQTLKLRSKSANEKVSLEDLAKILLSINKKRGYKSSRKVNAEDDGVAIDGMEVAKLLYDENMTPGEYVLRLLESGKKHLPDFYRSDLQEEFNLVWKKQSEFYPLILTKELFFELHGKNKSQTWAICKEPLGIVGVKLKGSAKEQKFARYRLRKEALTQQIELEHLAIVLQDINNDSNKSSGYLGAISDRSKELFFNKETVGQYQYKQLQKDPNTSLKNQVFYRQDYLDEFEVIWRNQAKFYPQLTNELKQEIRDVVIFYQRKLKSQKNLISFCQFESTQQNYVEKETGKTKIRTIGRRVIPRSSPLFQEFKIWQSLNNLKFVNSESNQIIQFIELEDDVKKVVFDELNLRGDLKPNQVLKILSKYMKIGKLTQWKCNLEEIEGNRTNSALYNVFQMIAEEEGYGFNWGKKSALEIKSELKAIFSSIGINDSILDFDFSKKLDQQLSYQLWHLLYSAEEGNSKITEEDKFTYGNTGVALKKKLHLKFGFKPEYSTLISNLRFTSDYGNLSSKAISKILPFLRDGSDYSKACQYAGYNHSNSLSADELDNRELKPKLELLKKNSLRNPVVEKILNQMVNVVNQVIDNYGKPDEVRIELARELKKSAKERSQMTKNISDATRRNAEIKKYLSKEFGIPNPTKGDVIRYRLWEELASNGYKDLFRDKYIPKEKLFSNEIDIEHIIPKALLFDDSFSNKTLAFKVDNLKKADRTAFDFMSTDFSKDVDSYIGRIETLHKDGKISSSKYKKLMIPKSKLVDGFIERDLRNTQYIAKQARKMLLEVFKTVVPTTGKITDKLREDWDLINVMKELNFPKYKALGLTKKIERFDVGSEKIKSINVIEGWSKRNDHRHHAMDALAVAFTTHNHIQYLNYLNARKDIHHEMHGTIKSIENQIIGKDVMGKRRFIPPISDLRMKAKLQIESILISFKNKNKVVTWSVNKTKLKGKDNYNKRRQLTPRGQLHKETVYGKIKLIDPKPLKLNNKFTLVRASMIVDKVHREIVLQHLSKYDNNSEVAFDSKTIKIDPILIEGIGLKEVVCYEDVFKIRKKISGDNFKNEKHLEKVIDEKVKQILKDRVIKFQGNFKEAFSNLEENPIWLNKSKGIAVKSVAIKGVNNAESLHEGKDHFGDQILDKNKKQIPVDFVSTGNNHHVGIYEDKDGNLQERVVSFFEAVTRVNEGLPIIDKTYNSDIGWKFKFTMKQNEMFVFPSDDFDPNEFDLTDGKNAAKISPNLYRVQKIATKNYMFRHHLETVVTNDLEFTYKSIRSTGWLRNLVKVRINHLGEIVYVGEY

SEQ ID NO: 979 - protein, 1186 aa, Gardnerella vaginalis
MEGNISYAIGIDVGLNSVGLAAIRLDDYGEPIRILKAMSVIHDAGIDPNGAKESDTRKAISGVARRVRRLYRQRRRRLQKLDFLLQSLGWPVVENKDLDFSDSFIPWIFRAKLADEYIADEEQRKQMLSVAIRHIARHRGWRNPYQSIKSMMQETEYSEFYNELLKNIEKLAPGVGCEGSTPAQLVRDYLLSQQGKASRRLRITTGGRRKNHPHSLDPVLPRKLMQSDNMLEILNIFNVQHIDDKYVREQIINAVFYAESPRGSAENRVGKDAITGKGKRALKASLAFQKYRIISTISNLRIRENSKERCLTIEEKQNVYKLLTTSIDKSSKRKSAEAPLYTWIDVADCLGIERYKLRGVGSQIGDGESVGNRPPMLNSELAILYANNKSLGQSLITWWLASNRTQEDKEALIEILSNTVDIEAIHDNPEYQDKYGSAIAFIDSMNETEIAALENISLPDGRAAYSLETLDELNKQMLETDDDLFEARKKLFNLPNNWRPAEAPIAEPTGNPSVDRVLKIVHRFLISAKNRWGNPERINIEHVRSGFQSKKMANSYKELLDKRTEGKENLKAMMRNSLHLGTSDSISDADIRRYEAVQRQNGQCLYCGSEITYHTCELDHIVPRKGPGSTNTRENLVATCSSCNAQKCNTPFATWCEQSTYCKNHDISADSAINRVRAFIFPPNSYDKRGANQFKKEVIARLKQKVGDEAFDNRSIESVAWMANELHRRIDWYYNSQNYQTNNGISDISNKAQTNVGVYAGSLTAIARRMSGIDGKLEFFDGRRKTRFDRRHHAVDASVIAMMTPGIAQILAIKCNLRETQLLQGNKVVPGGIDWKEYPTANDQGYQQYANWSVRMNALLKLLNEEMRADRIAVVNSIRLRYSNSSVHQYEVNALLKLHVGDEIDSETIRRSSTPALYCALTRNPDYDVNNGFPENPGRTILLHNKKLNADDSITFFKAQAVQLFVREGSAKIGNSIHHLRIYEYFEKLKSGKIKKSYGMIRVFQNDLHRHIHEDLFSCDLPEQSISMRYADTKVAHAVQTGNANYLGYLVPGDEIIVDFSHITLSENIGKFVEFLNKIGADCTAYRHWVVVGTDTEKVLILKPSMISSEGIDKLYSNCERNNFDYSSYEKSINEILAGKGWRVSVNVLAQYKAATIRRNALGEVRWASRSHLPISWSWDTGENRE

SEQ ID NO: 980 - protein, 1186 aa, Gardnerella vaginalis
MEGNISYAIGIDVGLNSVGLAAIRLDNNGEPIRILKAMSVIHDAGIDPNGAKESDTRKAISGVARRVRRLYRQRRRRLQKLDFLLHSLGFPVVENKDLDFSDSFIPWIFRAKLADEYIADEKQRKQMLSVAIRHIARHRGWRNPYQSIKSMTQETEYSEFYNELLKNIEKFAPGVGCEGSTPAQLVRDYLLLQQGKASRRLRITTDEKRKNHPNSLNPILPRKLMQSDNMLEILNIFNVQHIDDKYVREQIINAVFYAKSPRGSAENRVGKDAITGKGKRALKASLAFQKYRIISTISNLRIRENSKERCLTIEEKQSVYKLLTTSTDESSKEKSAEAPLYTWIDVADCLGIERYKLRGVGSQIGDGESVGNRPPMLNSELAIIYANNKSLGKSLLTWWLDANRTQEDKEALIEILSNTVDIEAIHDNPEYQDKYGSAIAFIDSMDETEIAALENISLPDGRAAYSLETLDKLNKQMLETDDDLFEARKKLFNLPNNWRPSEAPIAEPTGNPSVDRVLKIVHRFLISAKNRWGNPERINIEHVRSGFKSKKMANSYKELLDKRTKGKENLKAMMRNSLHLGMSDSISDADIRRYEAVQRQNGQCLYCGSEITYHTCELDHIVPRKGPGSTNTRENLVATCSLCNAQKCNTPFSTWCEQSTYCKNHDISVDSAINRVRAFIFPPNSYDKRGANQFKKEVIARLKQKVGDEAFDNRSIESVAWMANELHRRIDWYYNSQNYQTNNGISDITNKAQTNVGVYAGSLTAIARRMSGIDGKLEFFDGRRKTRFDRRHHAVDASVIAMMTPGIAQILAIKCNLRETQLLQGNKVVPGGIDWKEYPTANDQGYQQYANWSVRMNALLKLLNEEMRADRIAVVNSIRLRYNNSSVHQYKVNALLKLHVGDEIDSGTIRRSSTPALYCALTRNPDYDVNNGLPENPNRAILLHDKKLNADDSITFFKAQAVQLFVREGSAEIGSSTHHLRIYEYFKKLKSGKIKKSYGMIRVFQNDLHRHIHEDLFSCDLPEQSISMRYADTEVAHAVQTGNSNYLGYLVPGDEIIVDFSHVKLSGNIGTFVEFLNKIGANCAAYNHWVVVGTDTEKVLILKPSMISSEGIDKLYSNCKRNNFDYSSYEKSINEILVGKGWRVSVNVLAKYNAETIRRNALGEVRWTSRSHLPISWSWNTGENRE

SEQ ID NO: 981 - protein, 1258 aa, Gemella haemolysans
MTEENPDIRKVFLAIHHILKNRGHFLLQGQSFKEGNLNNLIKELLNLDILHISIEITEENINKITEIALEKKTLTDKVNDLKKIYPKEKQLLEAFRLIFGGKTSLDKLFAIDEYKELDASVKSVSFKEKIYEEVRHDYEQVLSNYIELLDLAKLVYDSIILSDIKKEGKTLSESKVELYHKHREDLTKLKTLVKNDSKLSEDKKVELYSAIFKEDKDKGTNYVNYIRKSEEGKGCNYEDFKKFLVKELAKLEESSAKEEILRDLELELFLPLQRTKDNSVVPYQIHKEELVKILDNAAKYHKFLNEKDDSGYSIIEKVIQLLEFRIPYYVGPLNSSKKAKVDGFAWSVRNKGYENTPVTPWNYEKVIDESASAEKFITNLTNKCTYLKGEDVLPKSSLLYSEFALLNELNALKYDGNRISLEARNVIIEKLFKEQGKKVTKTSIKNLLKAEGYIDGKGEITGIDITVKNDLKSYRDFKKILGDKFNTEHVENIILWITLYGESRKLIKAKIEAVYGDIYSKEEIAKMSRLVYKDWGRFSRKLLTELVSKKLYNEETGECLNIIGAMRQNNILFMELLADRFDYSQQIIDYNKELQKEVTEITPEILDDLYVSPSVKRSIWQTVRIVEELKKIIGCAPAKIFVETTRSNQDKKKPTDSRKKQLELFYKAVKKDVKDLEKEIGSLNFDKLNERLSSVEPSKLKAKKLYLYYTQLGRCMYSGETIDITQLNTTAYDIDHIYPQSKVKDDSFTNTVLVKREYNAAKTDRYPLGSDIQTPSNRRFWKFLKEKGLITDEKYNRLVRTEEFSDEELTGFIARQLVETSQSVKAVAGILGELNPKTSICYSKAENVSSFRQNFGKIKEGNRKSDNTEQLIKVREINDYHHAKDAYLNVVVGNVYDTKFTRNVFNFIKDKKDGRKYSLNNVFYENVSNSNNVAWELNKTVHQVEKVMNNNNILVTRRTSEQKGGLFDATVYKAKVAAKAKEGVYYPLKTSDPVVNDVTKYGGFTKVKIAYYSIFEYTLVNKKGEEKITRIIPIPIYVSQNIKDDSTLLEFGKTQINIKSGEEVKDFKLKYRKLCIGDLVKINNFFNFIGGKTNDSFVYDGAVQVTLDTESERYIKTLSKYQNWKKENKDGELWESITKEKNTELYNLLVEKMNSGIFIKKKPNKFNELNSEEIRNNFSSISLEEQAKVLLEVLNLLTNKKSIFDLKSINITAARGKISFNLSNLSQFSIIEQSVAGFYEKEITIIGDKENDMENNNC

SEQ ID NO: 982 - protein, 1054 aa, Haemophilus parainfluenzae
MENKNLNYILGLDLGIASVGWAVVEIDEKENPLRLIDVGVRTFERAEVPKTGESLALSRRLARSARRLTQRRVARLKKAKRLLKSENILLSTDERLPHQVWQLRVEGLDHKLERQEWAAVLLHLIKHRGYLSQRKNESKSENKELGALLSGVDNNHKLLQQATYRSPAELAVKKFEVEEGHIRNQQGAYTHTFSRLDLLAEMELLFSRQQHFGNPFASEKLLENLTALLMWQKPALSGEAILKMLGKCTFEDEYKAAKNTYSAERFVWITKLNNLRIQENGLERALNDNERLALMEQPYDKNRLFYSQVRSILKLSDEAIFKGLRYSGEDKKAIETKAVLMEMKAYHQIRKVLEGNNLKAEWAELKANPTLLDEIGTAFSLYKTDEDISAYLAGKLSQPVLNALLENLSFDKFIQLSLKALYKLLPLMQQGLRYDEACREIYGDHYGKKTEENHHFLPQIPADEIRNPVVLRTLTQARKVINGVVRLYGSPARIHIETGREVGKSYKDRRELEKRQEENRKQRENAIKEFKEYFPHFAGEPKAKDILKMRLYKQQNAKCLYSGKPIELHRLLEKGYVEVDHALPFSRTWDDSFNNKVLVLANENQNKGNLTPFEWLDGKHNSERWRAFKALVETSAFPYAKKQRILSQKLDEKGFIERNLNDTRYVARFLCNFIADNMHLTGEGKRKVFASNGQITALLRSRWGLAKSREDNDRHHALDAVVVACSTVAMQQKITRFVRFEAGDVFTGERIDRETGEIIPLHFPTPWQFFKQEVEIRIFSDNPKLELENRLPDRPQANHEFVQPLFVSRMPTRKMTGQGHMETVKSAKRLNEGISVIKMPLTKLKLKDLELMVNREREKDLYDTLKARLEAFNDDPAKAFAEPFIKKGGAIVKSVRVEQIQKSGVLVREGNGVADNASMVRVDVFTKGGKYFLVPIYTWQVAKGILPNKAATQYKDEEDWEVMDNSATFKFSLHPNDLVKLVTKKKTILGYFNGLNRATGNIDIKEHDLDKSKGKQGIFEGVGIKLALSFEKYQVDELGKNIRLCKPSKRQPVR

SEQ ID NO: 983 - protein, 1052 aa, Haemophilus parainfluenzae
MKNTSLNYVLGLDLGISSVGWAVVEIDEKENPLSLIDVGVRTFERAETQKGESLALARRLARSARRLTQRRVARLKKAKRLLKSENILLSTDECLPHQVWQLRVEGLERKLERQEWAAVLLHLIKHRGYLSQRKNESKSENKELGALLSGVANNHKLLQQTTYRTPAELAVKKFEVEEGHIRNQQGSYTHTFSRLDLLSEMELLFSRQQHFGNPFTSEKLLENLTALLMWQKPALSGDAILKMLGKCTFENEYKAAKHTYSAERFIWITKLNNLRIQENGLERALNDNERLALMKQPYEKAKLTYAQVRSILNLSDEAIFKGLRYSGEDKKTSETKTVLMEMKAYHQIRLALEKNDLKTEWAELKVNSSLLDEIGTAFSLYKTDEDISTCLAGKLSQPVLNALLENLNFDKFIQLSLKALHKILPLMQQGLRYDEACAEIYGDHYGKKTEENHLLLPQIPADEIRNPVVLRTLTQARKVINGVVRLYSSPARIHIETGREVGKSYQDRRELEKRQEENRKQREKAISEIKTLFPNFSGEPKAKDILKMRLYYQQNAKCLYSGKPLELHRLLEQGYVEIDHALPFSRTWDDSFNNKVLVLANENQNKGNLTPFEWLDGKNNSERWKAFKALVETSAFPYTKKQRILSQKLDEKGFIERNLNDTRYVARFLCNFIADNMHLTGEGKRKVFASNGQITALLRGRWGLAKSREDNDRHHALDAVVVACSTVSMQQKITRFVRFEEGNVFTGERIDRETGEIIPLHFPAPWKFFREEVEIRIFSDNPKLELENRLIARPQANHEFVQPLFVSRMPTRKMIGQGHMETIKSAKRLNEGLSVIKMLLTKLRLKDLESMVNREREKELYEALKARLEAFNDEPAKAFAEPFMKKGGAIVKSVRVEQVQKSGVLVRDGNGVADNASMVRVDVFTKGGKYFLVPIYTWQVAKGILPNKAVIQGKNEEDWEVMDDATFRFSLHQNDLVKLVTKKKTIFGYFNGLNRATGNIDIKEHDLEKSKVKDGIHQSIGIKLALSFEKYQVDELGKNIRLCKSSKRQAVR

SEQ ID NO: 984 - protein, 121 aa, Haemophilus pittmaniae
MLNRRYAAKITRFVRFEAGDVFTGERIDRETGEIIPLHFPTPWQFFKQEVEIRIFSDNPKLELENRLPDRPQANHEFVQPLFVSRMPTRKMTGQGHMETVKSAKRLNEGISVIKMPLTKLN

SEQ ID NO: 985 - protein, 203 aa, Haemophilus pittmaniae
MVNREREKDLYDALKARLEAFNDDPAKAFAEPFIKKGGAIVKSVRVEQVQKSGVLVREGNGVADNASMVRVDVFTKDGKYFLVPIYTWQVAKGILPNKAATQYKDEEDWEVMDNSAIFKFSLHPNDLVKLVTKKKTILGYFNGLDRATGNIAIKEHDLEKSKAKGGIHQGVGIKLALSFEKYQIDELGKNIRLCNPSKCQSVR

SEQ ID NO: 986 - protein, 1052 aa, Haemophilus sputorum
MKNTSLNYVLGLDLGISSVGWAVVEIDEKENPLSLIDVGVRTFERAETQKGESLALARRLARSARRLTQRRVARLKKAKRLLKSENILLSTDECLPHQVWQLRVEGLERKLERQEWAAVLLHLIKHRGYLSQRKNESKSENKELGALLSGVANNHKLLQQTTYRTPAELAVKKFEVEEGHIRNQQGSYTHTFSRLDLLSEMELLFSRQQHFGNPFTSEKLLENLTALLMWQKPALSGDAILKMLGKCTFENEYKAAKHTYSAERFIWITKLNNLRIQENGLERALNDNERLALMKQPYEKAKLTYAQVRSILNLSDEAIFKGLRYSGEDKKTSETKTVLMEMKAYHQIRLALEKNDLKTEWAELKVNSSLLDEIGTAFSLYKTDEDISTCLAGKLSQPVLNALLENLNFDKFIQLSLKALHKILPLMQQGLRYDEACAEIYGDHYGKKTEENHLLLPQIPADEIRNPVVLRTLTQARKVINGVVRLYSSPARIHIETGREVGKSYQDRRELEKRQEENRKQREKAISEIKTLFPNFSGEPKAKDILKMRLYYQQNAKCLYSGKPLELHRLLEQGYVEIDHALPFSRTWDDSFNNKVLVLANENQNKGNLTPFEWLDGKNNSERWKAFKALVETSAFPYTKKQRILSQKLDEKGFIERNLNDTRYVARFLCNFIADNMHLTGEGKRKVFASNGQITALLRGRWGLAKSREDNDRHHALDAVVVACSTVSMQQKITRFVRFEEGNVFTGERIDRETGEIIPLHFPAPWKFFREEVEIRIFSDNPKLELENRLIARPQANHEFVQPLFVSRMPTRKMTGQGHMETIKSAKRLNEGLSVIKMLLTKLRLKDLESMVNREREKELYEALKARLEAFNDEPAKAFAEPFMKKGGAIVKSVRVEQVQKSGVLVRDGNGVADNASMVRVDVFTKGGKYFLVPIYTWQVAKGILPNKAVIQGKNEEDWEVMDDATFRFSLHQNDLVKLVTKKKTIFGYFNGLNRATGNIDIKEHDLEKSKVKDGIHQSIGIKLALSFEKYQVDELGKNIRLCKSSKRQAVR

SEQ ID NO: 987 - protein, 1338 aa, Helcococcus kunzii
MQDYYLGLDIGTNSVGWAVTDENYNLLRKKGKDLWGVRLFKEAQPATERRGHRSSRRRTIRKSLRKQLLRELFEEEINAIDKDFFLRLDESKYWLEDKKIEGKYSLFNDENFTDKDYYEKFPTIFHLRKALIESDDKEDIRLYFLAINQMMKRRGHFLIDGKLSNVEDITPFKECIQNLINEELDTEIETEFYDKAIKIVSDYSLKKTEKKNLIKDLVKETDSIEDSKKIINIFNLLISGKSKVNGIFDDEEILEKIKEDNKEDFYLTSEKYEENLEYFSQLLDYRFELISSLKSIYDYIILQEVLKGKKYLSYAQVERYKNHKEDLRKLKQLIKKYDKNGKIYYQIFRDENFKKGYVAYLGYYKKNKKNVPVKKCDYDTFSKNIKSTLDKICDKEDPLYIELIDKIEKGGFLLKQIVSTNSVIPHQVHELELDKILENLEKNYPSFKEISDGVSKIDKIKMIFNFRIPYYVGPLNDYHKDKVNSNTWIVKNEGFENENIRPWNFSKIVDEHACEEEFIKRMINECSYIPGEKVLPKSSLLYSEYMVLNELNNLRVNGDKLNPKIKKEIVENIYKKERKVTLKKIRNFLIINNYVDSKVEFSGLSDGIKANMSSYIDFAEILDDNFDNNMVEDLIEQITIHVGNVKLLTEKISNKYPNLEKKQINKIVNLKFKDWARFSRKLLVGIEGTEKETGEINTIIGFLRETNENFMELMSNRYTFSEEISEIKKKYIPNKLSKQIVDDLYVSPAVKKMIWQVLNINDELIKVLGKQPKKIFIEMARGKEEKPEVKDSRKNKLIELYKNLGKEGKEWLNRIEDKTEADFRNRALYLYYTQMGRCMYTGEIIDIERLYDKELYDLDHIIPRKMKKDDSIHKNLVLVTRNSNQYEKKDNYPVPEVIKSRENVRHLWYALKKKGLITEEKYNRLTRINPLSDKELSEFIERQLVETRQTTKVVKDLFENYYTDSKIVTVKAGLVSELRRDFEVLKCREINDLNHAHDAFLNIIVGDVWSKKFTSNPYNFVKKNREKYTLNNIFTKNQKDLRGNEIWNCAEGKKRIIKTLNKPSVLFSVENFEQTGQLFDQNIIGKQDYKEKTSYVPIKGDERLQDISKYGGYRGISGAYFFIVEHTEKNKRVKTIESLPIYMKSYVEENGLLDFCTNEMKLVDPKIIVKKLNYKSEIIVDGFKYLISGKTENRLSLETNEYLYWNHTQTTDIKKILNINEKIELEKYNGDIESERENIIKYIQIILEKFKLKPFIKRRNLPNIEINFADYETEKLLQLLVNLIPLTTKYVSPVDLTVISGSKYAGKVLIPKKISNLNEVIFISKSITGIYESRRRII

SEQ ID NO: 988 - protein, 1023 aa, Helicobacter cinaedi
MKIYSFDIGVASIGWAFIENEVLQDCGIRIFTKAENPKNGASLALPRREARGVRKRLARRRGRLNTIKQLLCKEFGLQLEDYLSNDGELPKAYTASKANPLKSPYELRTLALSQKLDSKDLVRVILHIAKHRGYGNKHAKDSKDTESGKVKKAIEFNRKTLAEKGYRSVGEYLYREFFQQSRISQNNGATEFINVRNKAGNYEHCVAQDMLKEELESILNAQRQFGFSLKQDFENKLLTKIFEQRPLKSFADKVGNCCFIAGEKRTPKDSLSAIEFIALSRTINTLINLSKESGEIYNRAIILQIVESTLKKGEISYKELREIIRLDERLRFKDPRLDYSREIKEAEKVKFLEFKQLKGFKKALGESFTTLARSQLDEIAEHIALIKDRVKLNEKLESYALTKEQREALSNLSFSAHINLSLQALKQILPFMRGDNGEQCLDYDESVEKAGLKALSKDTLKGQMLPPLNEFEPYLSNPVVARALAEYRKVLNALLKQYGSPHKIHIEYAREAKLSSTERQKYEKEQKDNYAANQAAHKKCQELGLEPSSTNLLKLKLWQEQGGLCLYSGAKITISYLQDPTALQVDHIYPYSRSFDDSYMNKCLVLTKANQEKGNRTPFEAFGTDSAKWGVITTLAQKLPHKKRRRILNTAFNDKEAGFKLRNLNDTSYIARLVADYTETYLEFLPLVESENTTLGKGQKGSKKHIAIVNGALTSTMRYYLGFASKDRDNHLHHALDAVIIGFMNDSVIKAFSDFKKTQETSKAAYYAHTLSKQEYKKQRAFIQLPSGENFRASVLEKVESVFVSKPPRKRVRGALHEATFYSPNDPKLLKNYGGTKGVERALALGKMRKVGAKIVSNGAMVRVDIFRHKSSGKFYGVPVYTMDFALGILPNKAVVVGKDKNGVIKDWLEMDSSYEFIFSLYKDDLLLVQKKEMAEPELCYFMSFNSSIAQISVAKHDNNFSTLTKNQKLLFSNATQEDVSGKSIGIQNLQVFEKWQVSVLGEVKRTQSYPRENISLASKAKK

SEQ ID NO: 989 - protein, 1023 aa, Helicobacter cinaedi
MKIYSFDIGVASIGWAFIENEVLQDCGIRIFTKAENPKNGASLALPRREARGVRKRLARRRGRLNTIKQLLCKEFGLQLEDYLSNDGELPKAYTASKANPLKSPYELRTLALSQKLDSKDLVRVILHIAKHRGYGNKHAKDSKDTESGKVKKAIEFNRKTLAEKGYRSVGEYLYREFFQQSRISQNNGATEFINVRNKAGNYEHCVAQDMLKEELESILNAQRQFGFSLKQDFESKLLTKIFEQRPLKSFADKVGNCCFIAGEKRAPKDSPSAIEFIALSRTINTLINLSKESGEIYNRAIILQIVESTLKKGEISYKELREIIRLDERLRFKDPRLDYSREIKEAEKVKFLEFKQLKGFKKALGESFTTLAISQLDEIAEHIALIKDRVKLNEKLESYALTKEQREALSNLSFSAHINLSLQALKQILPFMRGDNGEQCLDYDESVEKAGLKALSKDTLKGQMLPPLNEFEPYLSNPVVARALAEYRKVLNVLLKQYGSPHKIHIEYAREAKLSSTERQKYEKEQKDNYAANQAAHKKCQELGLEPSSTNLLKLKLWQEQGGLCLYSGAKITISYLQDPTALQVDHIYPYSRSFDDSYMNKCLVLTKANQEKGNRTPFEAFGTDSAKWGVITTLAQKLPHKKRRRILNTAFNDKEAGFKLRNLNDTSYIARLVADYTETYLEFLPLVESENTTLSKGQKGSKKHIAIVNGVLTSTMRYYLGFASKDRDNHLHHALDAVIIGFMNDSVIKAFSDFKKTQETSKAAYYAHTLSKQEYKKQRAFIQLPSGENFRVSVLEKVESVFVSKPPRKRVRGALHEATFYSPNDPKLLKNYGGTKGVERALALGKMRKVGAKIVSNGAMVRVDIFRHKSSGKFYGVPVYTMDFALGILPNKAVVVGKDQNGVIKDWLEMDSSYEFIFSLYKDDVILVQKKEMQRPELCYFVSFDTSGASIKVAKHDNNFSTLTENQKLLFSNATKEEVVGKSIGIQNLKVFEKWQVSVLGEVKRTQSYPRENISLASKAKK

SEQ ID NO: 990 - protein, 344 aa, Helicobacter pullorum
MKILGFDIGIASIGWAFVENGELKDCGVRIFTKAENPKTGDSLAMPRREARSVRRRLARRKGRLETLKRLLAKEWDLCYEDYIAADGELPKAFMGKNLTNPYVLRYEALQRLLSKEELVRVVLHIAKHRGYGNKNAKITKSEESKREQGKILSALATNASVIARYRTVGEYFYKEFCEVIKNPQGLNTNENCTQPKVRVLKPIRNKGGEYTNCILQEDLQRELRCIFEHQKGFGFSITQEFQDKILKIAFYQRSLKDFSHLVGKCTFYPDEPRAPKFSLSAIEFITKAKAINLLASIAKESGEVWDKEQWRERLDSVFSAVCERGINTIPSSSHFLNIFDILYL

SEQ ID NO: 991 - protein, 1688 aa, Ignavibacterium album
MEFKKVLGLDIGTNSIGCALLSLPKSIQDYGKGGRLEWLTSRVIPLDADYMKAFIDGKNGLPQVITPAGKRRQKRGSRRLKHRYKLRRSRLIRVFKTLNWLPEDFPLDNPKRIKETISTEGKFSFRISDYVPISDESYREFYREFGYPENEIEQVIEEINFRRKTKGKNKNPMIKLLPEDWVVYYLRKKALIKPTTKEELIRIIYLFNQRRGFKSSRKDLTETAILDYDEFAKRLAEKEKYSAENYETKFVSITKVKEVVELKTDGRKGKKRFKVILEDSRIEPYEIERKEKPDWEGKEYTFLVTQKLEKGKFKQNKPDLPKEEDWALCTTALDNRMGSKHPGEFFFDELLKAFKEKRGYKIRQYPVNRWRYKKELEFIWTKQCQLNPELNNLNINKEILRKLATVLYPSQSKFFGPKIKEFENSDVLHIISEDIIYYQRDLKSQKSLISECRYEKRKGIDGEIYGLKCIPKSSPLYQEFRIWQDIHNIKVIRKESEVNGKKKINIDETQLYINENIKEKLFELFNSKDSLSEKDILELISLNIINSGIKISKKEEETTHRINLFANRKELKGNETKSRYRKVFKKLGFDGEYILNHPSKLNRLWHSDYSNDYADKEKTEKSILSSLGWKNRNGKWEKSKNYDVFNLPLEVAKAIANLPPLKKEYGSYSALAIRKMLVVMRDGKYWQHPDQIAKDQENTSLMLFDKNLIQLTNNQRKVLNKYLLTLAEVQKRSTLIKQKLNEIEHNPYKLELVSDQDLEKQVLKSFLEKKNESDYLKGLKTYQAGYLIYGKHSEKDVPIVNSPDELGEYIRKKLPNNSLRNPIVEQVIRETIFIVRDVWKSFGIIDEIHIELGRELKNNSEERKKTSESQEKNFQEKERARKLLKELLNSSNFEHYDENGNKIFSSFTVNPNPDSPLDIEKFRIWKNQSGLTDEELNKKLKDEKIPTEIEVKKYILWLTQKCRSPYTGKIIPLSKLFDSNVYEIEHIIPRSKMKNDSTNNLVICELGVNKAKGDRLAANFISESNGKCKFGEVEYTLLKYGDYLQYCKDTFKYQKAKYKNLLATEPPEDFIERQINDTRYIGRKLAELLTPVVKDSKNIIFTIGSITSELKITWGLNGVWKDILRPRFKRLESIINKKLIFQDEDDPNKYHFDLSINPQLDKEGLKRLDHRHHALDATIIAATTREHVRYLNSLNAADNDEEKREYFLSLCNHKIRDFKLPWENFTSEVKSKLLSCVVSYKESKPILSDPFNKYLKWEYKNGKWQKVFAIQIKNDRWKAVRRSMFKEPIGTVWIKKIKEVSLKEAIKIQAIWEEVKNDPVRKKKEKYIYDDYAQKVIAKIVQELGLSSSMRKQDDEKLNKFINEAKVSAGVNKNLNTTNKTIYNLEGRFYEKIKVAEYVLYKAKRMPLNKKEYIEKLSLQKMFNDLPNFILEKSILDNYPEILKELESDNKYIIEPHKKNNPVNRLLLEHILEYHNNPKEAFSTEGLEKLNKKAINKIGKPIKYITRLDGDINEEEIFRGAVFETDKGSNVYFVMYENNQTKDREFLKPNPSISVLKAIEHKNKIDFFAPNRLGFSRIILSPGDLVYVPTNDQYVLIKDNSSNETIINWDDNEFISNRIYQVKKFTGNSCYFLKNDIASLILSYSASNGVGEFGSQNISEYSVDDPPIRIKDVCIKIRVDRLGNVRPL

SEQ ID NO: 992 - protein, 1354 aa, Indibacter alkaliphilus
MKKILGLDLGTTSIGWAFIKEPEKDVVGSEIVDMGVRIVPLSSDEENDFAKGNTISINADRTLKRGARRNLQRFKQRRNALLETFKEKNLIPSNFQYAEDGPSSTFSTLKLRDKAAKEKIELDDFVKVLLQINKKRGYKSSRKAMSEEDEGTAIDSMGIAKELYENDLTPGQWVYEALKNGRKNVPDFYRSDLQEEFKKIVNYQSEFYPDILNTSFVEDWMGKASTPTKQYFNKRGVQLAENKGKREERRLQEYKWRAEAVNFKIDLSEIALILSQINSQISNSSGYLGAISDRSKELYFKNLTVGQYLYQQVKKNPHTRLKGQVFYRQDYLDEFEKIWSVQSSFYPQLNDELKQEVRDVTIFFQRRLKSQKHLISNCEFEEHHKVVPKSHPIFQEFRIWQNLNNLTLIKKDNLNEKCELALEDKTALANELAFKKELSVKDALKVLGLKPSDWEFNFTKIEGNRTNHAFFEAFAKIIELEDGEPIDLGNLKADDILDQFSEAFLRIGIDTELLQVNSDIEGAEYEKQSYIQFWHLLYSSEDDQKLKQNLIRKFGFKPEHAKILASISLQDDHASLSSRAIKKILPHLQSGLIYDKACTYAGYNHSSSFTKDENEKRELRAELELLKKNSLRNPVVEKILNQMINVVNAILKDPNLGRPDEIRVEMARELKANAEQRKNMTSNIASATRDHEKYREILKKEFGLKRVTKNDLLRYKLWLETDGISLYTGKPIEASKLFSKEYDIEHIIPKARLFDDSFSNKTICERQLNIDKANVTAFSFLQNKLSADEFEQYQSRVKSLYGKLSKAKIQKLLMANDKIPEDFIARQLQETRYISKKAKEILFEITMRVSVTTGTITDKLREDWGLVEIMKELNWEKYDKLGLTYTIEGKHGERLNKIKDWNKRNDHRHHAMDALTVALTKPAYIQYLNNLNAKAIGNKKGTEIFAIEQKYLKRENGKLCFIPPIENIRAEAKKHLSKILVSYKAKNKVVTINKNKTKKKAGFNEQTALTPRGQLHKETVYGKSFHYSTKFEKIGASFDAQKINTVAKKEEREALLKRLAENGNDPKKAFTGKNSLNKMPIYLDLGKNIKLSEKVKTVVLEQNYTIRKNIDPDLKVDKVIDVGIKRILESRLEEFGGNAKLAFSNLEENPIWLNKEKGIPIKRVKISGVSNVESLHVKKDHFGEKILDEEGNEIPVDFVSTGNNHHVAIYEDEDGNLQDEVVNFYEAVIRRNQGESIIKYRHEEGWNFLYSIKQNEFFVFPSQDFNPNDFDLLDPKNYDLISPNLYRAQKFSKVMYGNSAVRDYVFRHHLETVLNDVKELKDVAYKQLKSLQYLNGIKKVRLNHLGQIIQVGEY

SEQ ID NO: 993 - protein, 1397 aa, Joostella marina
MKKVLGLDLGTNSIGWALVNEATKEEKKEGKSSEIIKLGVRVNPLTVDEKTNFEKGRPLSTNADRTLKRSARRNLQRYKLRRRNLIEILIKNGFITKDTPLTETGKDTTHQTLKLRAKSAKEKVDLKDFAKILLTINKKRGYKSSRKVNSDEDGLAIDGMAVAKHLYEQNLTPGQYVLNLLQKNKKYVPDFYRSDLQEEFKNIWNNQKTYYFDILTDTLFEELKDKNKSQTWAICKKPFDIAGIKQIGKASDKRLERYKWRTEGLTQKLNLEYLAIALQEINNDINKSSGYLGAISDRSKELFFNKETVGENLYRQLVKTPHTSLRNQVFYRQDYLDEFETIWETQAKFYPQLTHTLKEEIRDVIIFYQRKLKSQKSLISFCQFESWEQTYIEKETGKSKTRTVGRKVIPKSSPLFQEFKIWQNLNSLEFRNSDEGEIIEFIKLDEDIRQTVFEELNLRGNLKPNDVLKILGNYISLGKVSQWKCNFEEIEGNRTNAALYNVYQIIAENEGYGFDWAKKTASEINKELKNIFPQLGIDASILDFDFTQANFDKQTSYQLWHLLYSAEEDFKISEEDKVLYGNSSVSLKKKLHQKYGFKPEYTKLLTNISLQPDYGNLSAKAICNILPYLKENNVYSEACDLTGYNHSNFLTAEEQAKRPLKPILELLKKNSLRNPVVEKILNQMVNVVNQVIETYGKPDEIRIELTRELKKSAKERANMTKSIADATRRNDDYRKTIIKEFGIPNPTKSDVVRYRLWQELASRGYKDIFTDTEIKPQELFSNKIDIEHIIPKALLFDDSFSNKTLAFKKDNLKKANRTAYDFIANDYAPNLENYIERVESLHKDRKITRAKRNKLLMLQSKLPDGFIERDLRNSQYITKEAKKMLYEVCRTVVSTSGSITDKLREDWDLINVMKELNFPKYKALGLTEKIERYDIGAEKMKEVEIIEDWNKRNDHRHHAIDALTVAFSTHSHIQYLNHLNARRDEGHKKHAAIIAIESTITEKEGNKKRRFIAPLPNFRLQAKEHIESILVSFKNKNKVVTNNINKTKRIKKDKFNTKVQLTPRGQLHKETIYGKIKQPLEKHIKLNKSFTLEQAKLIIDKRQREKVLNHLEKYAHNSDIAFNSKTLKKNPLLISDEPLKEVLCFEEVFTIRKDISYDNFKNEKQLDKVIDEKVKQALKERINQYNGDFREAFSDIERNPIWLNKAKGICVKRATIKGVSNAEPLHTAKNHLGEEVLTENKEQIPVDYVSTGNNHHVAIYEDEDGNLQEKVVSFYEAVIRVNEGLPIIDKEYNKSLGWTFKFTMKQNEMFVFPSEDFNPTEIDLLDQKNASLISPNLFRVQKFTIKDYFFRHHLETTVENNNTLKNTTWRREGLSGIYGIIKIRLNHLGEIVQVGEY

SEQ ID NO: 994 - protein, 1060 aa, Kingella kingae
MAAKSLNYILGLDLGIASCGWAVVEMDEQENPLRLIDVGVRTFEEAENPKDGSSLAETRRLARAQRRLISRRANRMNKLCRLLKQENVLQANDYDEKGLIIGLPNQAWELRAQGLDRKLEPKEWAAVLIHLVKHRGYLSQRKNESQTADKELGALLSGMNHNHQLLQSQSNQYRTPAELAIKQFATQDGHIRNQRGAYTHTFNRLDLQNELNQLFDAQTRLGNPHVSGSLKTAINDLLMNQKAALSGDAILEMLGRCTFEPSEYKAAKNTYSAERFVWLGKLTNLRIQDNGLESALSREQRELLLNEPYNKTKLTYQQVRKLLRLPETAFFKGLRYGKDNAESATFMEMKSYHAIRKSLENKSLKSEWEKLKTQPKLLDLIGTAFSIYKTDDEIAGCLKNQLPENVIIALQGQLNFSNFMELSLKALEKLLPLMEQGLRYDEACTQIYGNRHEKIADKTEKFLPNIPADKLRNPVVLRTLTQARKVINAIIRRYGSPARVHIETGREVGKSFSDRDKLKKQQEENQEQRRRAIDEWKQFFPNAAHEPKAVDILKLRLYQLQQGKCLYSGLPIDVRRLPEKGYVEIDHALPFSRTWDDSFNNKILVLASENQNKGNQTPYEYLRGADNSESWRLFVENVQNCQFSPNKKQKIMAKQLDEKGFLERNLNDTRYVSRFLCQFISEHLHLTGKGKKRVFASNGQITALLRGRWGLSKNREENDRHHAVDAVVVACSTVAMQQKITQFVRYQKGNVFTGERIDKETGEVISIHFPTPWEHFREEVMIRVFDDNPLRTLPEKLPNRPEALHEYVMPLFVSRMPTRKMTGQGHKETIKSAKRLDEKISVLRVPLTQLKLNDLENMVNREREPALYEALKARLEQFKNDPAKAFAEPFFKQGGQQVKAVRVEIVQKSGMLLRKINGVADNGSMVRVDVFEKSGKFYLVPIYAWQVAEGILPNYAVVAHKDESDWILMDESYHFKFALYKNDLLEVQTKKGGIMGYFASLDRATGAITIREHDRDKKKCKDGEHRSIGVKMASSFKKLQVDELGKNIHETRSRKRPNIG

SEQ ID NO: 995 - protein, 1314 aa, Lactobacillus animalis
MLKKDYSIGLDIGTNSVGHAVVTDDYKVPTKKMKVFGDTSKKTIKKNMLGVLLFNEGQTAADTRLKRGTRRRYTRRKNRLRYLQEIFAPELAKVDPNFLYRLEESSLVAEDKKYDVYPIFGKREEELLYHDTYKTIYHLRSALANNDQPADLRLVYLALAHIIKYRGNFLLEGEIDLRTTDINKVFAEFSETLNENSDENLGKLDVADIFKNNTFSKTKKSEELLKLSGAKKNQLAHQLFKMMVGNMGSFKKVLGTDEEHKLSFGKDTYEDDLNDLLAEAGDQYLDIFVAAKKVYDAAILASILDVKDTQTKTVFSQAMIERYEEHQKDLIELKRVFKKYLPEKCHDFFSEPKISGYAGYIDGKVSEEDFYKYTKKTLKGIPETEEILQKIDANNYLRKQRTFDNGAIPHQVHLKELVAIVENQGKYYPFLRENKDKFEKILNFRIPYYVGPLARGNSKFAWLTRAGEGKITPYNFDEMIDKETSAEDFIKHMTINDLYLPTEPVLPKHSLLYERYTIFNELAGVRYVTENGEAKYFDAQTKRSIFELFKLDRKVSEKMVIKHLKVVMPAIRIQALKGLDNGKFNASYGTYKDLVDMGVAPELLNDEVNSEKWEDIIKTLTIFEGRKLIKRRLENYRDFLGEDILRKLSRKKYTGWGRLSAKLLDGIYDKKTHKTILDCLMTEDYSQNFMQLINDDNYSFKETIKNAQVIEKEETLAKTVQELPGSPAIKKGILQSLEIVDEIIKVMGYKPKSIVVEMARETQKTHGTRKREDRVQQIVENLKDANELPEKLPSNAELSDERKYLYCLQNGRDMYTGAPLDYDHLQFYDVDHIIPQSFLKDDSIENKVLTIKKENVRKTNGLPSEAVIQKMGSFWKKLLDAGAMTNKKYDNLRRNLHGGLNEKLKERFIERQLVETRQITKYVAQLLDQRLNYDGNGVELDEKIAIVTLKAQLASQFRSEFKLRKVRALNNLHHAHDAYLNAIVANLIMAKYPELEPEFVYGKYRKAKFKGLGKATAKNTLYANVLYFLKENEVYPFWDKARDLPTIKRYLYRAQVNKVRKAERQIGGFSDEMLVPKSDSGKLLPRKEGLDPVKYGGYAKAVESYAVLITADEVKKGKTKKVKTLVNIPIIDSKKYEADPTAYLASRGYTNVTNSFILPKYSLLEDPEGRRRYLASFKEFQKANELILPQHLVELLYWVNAKDGEQKLEDHKAEFKELFDKIMEFADKYVVAPKNSEKIRRLYEENQDATPMELGKNFVELLRYTADGAASDFKFFGENIPRKRYNSAGSLLNGTLIYQSKTGLYETRIDLGKL

SEQ ID NO: 996 - protein, 1371 aa, Lactobacillus buchneri
MKVNNYHIGLDIGTSSIGWVAIGKDGKPLRVKGKTAIGARLFQEGNPAADRRMFRTTRRRLSRRKWRLKLLEEIFDPYITPVDSTFFARLKQSNLSPKDSRKEFKGSMLFPDLTDMQYHKNYPTIYHLRHALMTQDKKFDIRMVYLAIHHIVKYRGNFLNSTPVDSFKASKVDFVDQFKKLNELYAAINPEESFKINLANSEDIGHQFLDPSIRKFDKKKQIPKIVPVMMNDKVTDRLNGKIASEIIHAILGYKAKLDVVLQCTPVDSKPWALKFDDEDIDAKLEKILPEMDENQQSIVAILQNLYSQVTLNQIVPNGMSLSESMIEKYNDHHDHLKLYKKLIDQLADPKKKAVLKKAYSQYVGDDGKVIEQAEFWSSVKKNLDDSELSKQIMDLIDAEKFMPKQRTSQNGVIPHQLHQRELDEIIEHQSKYYPWLVEINPNKHDLHLAKYKIEQLVAFRVPYYVGPMITPKDQAESAETVFSWMERKGTETGQITPWNFDEKVDRKASANRFIKRMTTKDTYLIGEDVLPDESLLYEKFKVLNELNMVRVNGKLLKVADKQAIFQDLFENYKHVSVKKLQNYIKAKTGLPSDPEISGLSDPEHFNNSLGTYNDFKKLFGSKVDEPDLQDDFEKIVEWSTVFEDKKILREKLNEITWLSDQQKDVLESSRYQGWGRLSKKLLTGIVNDQGERIIDKLWNTNKNFMQIQSDDDFAKRIHEANADQMQAVDVEDVLADAYTSPQNKKAIRQVVKVVDDIQKAMGGVAPKYISIEFTRSEDRNPRRTISRQRQLENTLKDTAKSLAKSINPELLSELDNAAKSKKGLTDRLYLYFTQLGKDIYTGEPINIDELNKYDIDHILPQAFIKDNSLDNRVLVLTAVNNGKSDNVPLRMFGAKMGHFWKQLAEAGLISKRKLKNLQTDPDTISKYAMHGFIRRQLVETSQVIKLVANILGDKYRNDDTKIIEITARMNHQMRDEFGFIKNREINDYHHAFDAYLTAFLGRYLYHRYIKLRPYFVYGDFKKFREDKVTMRNFNFLHDLTDDTQEKIADAETGEVIWDRENSIQQLKDVYHYKFMLISHEVYTLRGAMFNQTVYPASDAGKRKLIPVKADRPVNVYGGYSGSADAYMAIVRIHNKKGDKYRVVGVPMRALDRLDAAKNVSDADFDRALKDVLAPQLTKTKKSRKTGEITQVIEDFEIVLGKVMYRQLMIDGDKKFMLGSSTYQYNAKQLVLSDQSVKTLASKGRLDPLQESMDYNNVYTEILDKVNQYFSLYDMNKFRHKLNLGFSKFISFPNHNVLDGNTKVSSGKREILQEILNGLHANPTFGNLKDVGITTPFGQLQQPNGILLSDETKIRYQSPTGLFERTVSLKDL

SEQ ID NO: 997 - protein, 315 aa, Lactobacillus casei
MFKDYLKQLEDDGTAKAIRQLYDRYIDGDDAKPFVREDFVKALTKEVTAHPNAKSPELLERLAQPDFMLKQRNKANGAIPVQMQQRELDQIIKNQSVYYDWLAAPNPVEKHRKSMPYQLDELLNFRIPYYVGPLVTAKEQKAARGGVFAWMVRKDPDGNITPYNFDEKVDREASANTFIQRMKTTDTYLIGEDVLPKQSLLYQSYEVLNELNNVRVNDNKLSFDQKQQVLGELFERHNTVTIKQFVDNLLAHGDYDRIPEVRGLADEKRFLSSLSTYNQLKGILHEAIDDSDKQTDMVDCKINPNAVRTKKISFL

SEQ ID NO: 998 - protein, 236 aa, Lactobacillus casei
MFKDYLKQLEDDGTAKAIRQLYDRYIDGDDAKPFVREDFVKALTKEVTAHPNAKSPELLERLAQPDFMLKQRNKANGAIPVQMQQRELDQIIKNQSVYYDWLAAPNPVEKHRKSMPYQLDELLNFRIPYYVGPLVTAKEQKAARGGVFAWMVRKDPDGNITPYNFDEKVDREASANTFIQRMKTTDTYLIGEDVLPKQSLLYQSYEVLNELNNVRVNDNKLSSSIFKSSATMITNS

SEQ ID NO: 999 - protein, 1389 aa, Lactobacillus casei
MIIRTYELKTITTIAILKMFQLLTGGLSMTKLGKPYGIGVDIGSNSIGFAAVDENSHLIRLKGKTVIGARLFEEGKAAADRRASRTTRRRLSRNRWRLSFLRDFFESHITPTGPNFFMRQKYSEISPKDKARYKYEKRLFNDRTDAEFYQQYPTMYHLRNRLLTDPSKADVREIYFAIHHILKSRGHFLTSGYAKDFNTNKVALNEIFPALQDAYAQVYPDLDITFDENKVNEFKTVLLNEKATPSDTQRALVNLLLAEDGDKDILKQQKQVLTEFAKAVVGLKTKLNVALGTEVDSSEATVWNFSLGQLDDKWAGIESAMTDEGTEILDQIRDLYRARLLNGIVPAGKTLSQAKVDDYAQHHEDLELFKDYLKQLEDDGTAKAIRQLYDRYIDGDDAKPFVREDFVKALTKEVTAHPNAKSPELLERLAQPDFMLKQRNKANGAIPVQMQQRELDQIIKNQSVYYDWLAAPNPVEKHRKSMPYQLDELLNFRIPYYVGPLVTAKEQKAAQGGVFAWMVRKDPDGNITPYNFDEKVDREASANTFIQRMKTTDTYLIGEDVLPKQSLLYQRYEVLNELNNVRVNNEKLSIEQKQQVIRELFERHNSVTIKQFAENLRAHGDYAHIPEIRGLADEKRFLSSLSTYRQLKSLLPDAIDDPAKQADIENIIAWSTVFEDAAIFKTKLKEINWLDSQTITKLSNIRYRGWGQFSHKFLNGLTLGNGHTIIQELFLSNNNLMQILTDETLQKKMTELNADKLKAANINDAIDDAYTSPSNKKALRQVLRVIEDIKRAADGQDPSWLYVETADGGGTPGKRTRARQHQLQEIYANAAHELIDSAVRGELEDKIADKADFNDRLVLYFMQGGRDIYTGTPLNIDQLSSYDIDHILPQSLIKDNSLDNRVLVHAIINREKNATFASTIYAQKMNATWRQWHEAGLISGRKLRNLQMRPDQIDKYASGFVARQLVETRQIIKLTEQIVAAQYPETKIIAVKAGLSHQLREELEFPKNRDVNHYHHAFDAFLAARIGTYLLKRFPNLQAFFTYGKFKKADVKKLRGFNFIRDITHAEDKIVVKDTGEVIWDKKRDVDELDRIYNFKRMLITHEVHFEKADLFKQTVYGAKDSKEAGGKKQLISKKKGYPVDIYGGYTQETGSYLSVVRLTKKAMYAVVKVSTRDAAKLAVAKSISEQKENETLNDIIDEKLSKISKNGKITHELFEVVLPRVGQKTLFKNSKYNLFLVNSDTYMHNYQELWMPREYQKMWKDISLSKYGDAQTEDQLDQIFGFIVSQVNSYFNLYDINQFRKKLNDAADKFATLPMRDTDDMQGKIATIGQLLIGLQANAARSDLRNLDIKTPLGLLQIPNGISLDSDTSVVYQSPTGLLEREVHLSDL

SEQ ID NO: 1000 - protein, 412 aa, Lactobacillus casei
MIKDNSLDNRVLVHPLVNREKDTIFASTRFAKQTNGMWRQWHAAGLISSRKLRNLQMRPDEIDKYASGFVARQLVETRQIIKLTEQIVADQYPDTKIIAVKAGLSSQLRKELDFPKNREVNHYHHAFDAFLAARIGTYLLKRYPNLEPFFTYGKFKKTEVKKLKSFNFIRDMTHAKDKIVAKETGEIVWDNASDINELDRIYNFKRMLITHEVRFETASLFKQTLYAAKNPKNRGGSRQLIPKKKGYLVDIYGGYTQETGSYLSVVRLTKKAMYAVVKVSTRDAAKLAVAKSISEQKENETLKKIIDGKLSKTSKKGKTTHQLFEIVLPRVGQKTLFKNSKYNQFLVNSDTYMHNYQELWMPREYQRMWKDILLSNHGDAQIEGQLDQIFKFIVSQVNSYFNLYDINQFRKK

SEQ ID NO: 1001 - protein, 234 aa, Lactobacillus casei
MKVTKKTETIFKVVKIATSQVAALNKARSRSTAEELSVLTELLKPKFSKVGKNGKITDTPFEVVLPRVPREQLFYNAKYGFFMVNSDTMFHNFQEIWVSRSDQKILQQIRKAKIDYPNVDQDLDNLFHNLADQIVKYFDLYSIAGFKEKISQSQNTFNDLAVDDTDQSVGKITVINELLKGAQANGMTGSLKVLKISTPFGFTQDKSGVLTKDSSIIYQSPTGLFERSVRLTDL

SEQ ID NO: 1002 - protein, 566 aa, Lactobacillus casei
MQILTDEVLKQKIAELNAHELKASGIYAAIDDAYTSPSNKKALRQVLSVIDDITNAAGQAPNWLYIETADGDGVPGKRTNSRQRKIQEIYVNAAQELITSSVRGELEDKIASRADFTDRLVLYFMQGGRDIYTGEPLNIDNLSSYDIDHILPQSLIKDNSLDNRVLVHPLVNREKDTIFASTRFAKQMNGMWRQWHAAGLISSRKLRNLQMRPDEIDKYASGFVARQLVETRQIIKLTEQIVADQYPDAKIIAVKAGLSSQLRKELDFPKNREVNHYHHAFDAFLAARIGTYLLKRYPNLEPFFTYGKFKKTEVKKLKSFNFIRDMTHAKDKIVAKETGEIVWDNASDINELDRIYNFKRMLITHEVRFETASLFKQTLYAAKNSKNRGGSRQLIPKKKGYLVDIYGGYTQETGSYLSVVRLTKKAMYAVVKVSTRDAAKLAVAKSISEQKENETLKKIIDGKLSKTSKKGKTTHQLFEIVLPRVGQKTLFKNSKYNQFLVNSDTYMHNYQELWMPREYQRMWKDILLSNHGDAQLEGQLDQIFKFIVSQVNSYFNLYDINQFRKK

SEQ ID NO: 1003 - protein, 1363 aa, Lactobacillus casei
MTKLGKPYGIGVDIGSNSIGFAAVDENSHLIRLKGKTVIGARLFEEGKAAADRRASRTTRRRLSRNRWRLSFLRDFFESHITPTDPNFFMRQKYSEISPKDKARYKYEKRLFNDRTDAEFYQQYPTMYHLRNRLLTDPSKADVREIYFAIHHILKSRGHFLTSGYAKDFNTNKVALNEIFPALQDAYAQVYPDLDITFDENKVNEFKTVLLDEKATPSDTQRALVNLLLAEDGDKDILKQQKQVLTEFAKAVVGLKMKLNVALGTEVDSSEATAWNFSLGQLDDKWAGIESAMTDEGTEILDQIRDLYRARLLNGIVPAGKTLSQAKVDDYEQHHEDLELFKDYLKQLEDDGMAKVIRQLYDRYIDGDDAKPFVREDFVKALTKEVTAHPNAKSPELLERLVQPDFMLKQRNKANGAIPVQMQQRELDQIIKNQSVYYDWLAAPNPVEKHRQSMPYQLDELLNFRIPYYVGPLVTAKEQKAAQGGVFAWMVRKDPDGNITPYNFDEKVDREASANTFIQRMKTTDTYLIGEDVLPKQSLLYQSYEVLNELNNVRVNDNKLSFDQKQQVLGELFERHNTVTIKQFVDNLLAHGDYDRIPEVRGLADEKRFLSSLSTYNQLKGILHEAIDDSDKQTDIEKIIAWSTIFEDKAIFKTKLNEISWLTAGMINSLANIRYRGWGQFSHKLLNELTLSTGRTVFEELLISSHNLMQILTDEVLKQKIAELNAHELKASGIYAAIDDAYTSPSNKKALRQVLSVIDDITNAAGQAPNWLYIETADGDGVPGKRTNSRQRKIQEIYANAAQELITGSVRGELEDKIASRADFTDRLVLYFMQGGRDIYTGEPLNIDNLSSYDIDHILPQSLIKDNSLDNRVLVHPLVNREKDTIFASTRFAKQMNGMWRQWHAAGLISSRKLRNLQMRPDEIDKYASGFVARQLVETRQIIKLTEQIVADQYPDAKIIAVKAGLSSQLRKELDFPKNREVNHYHHAFDAFLAARIGTYLLKRYPNLEPFFTYGKFKKTEVKKLKSLKSFNFIRDMTHAKDKIVAKETGEIVWDNASDINELDRIYNFKRMLITHEVRFETASLFKQTLYAAKNSKNRGGSRQLIPKKKGYLVDIYGGYTQETGSYLSVVRLTKKAMYAVVKVSTRDAAKLAVAKSISEQKENETLKKIIDGKLSKTSKKGKTTHQLFEIVLPRVGQKTLFKNSKYNQFLVNSDTYMHNYQELWMPREYQRMWKDILLSNHGDAQLEGQLDQIFKFIVSQVNSYFNLYDINQFRKKIADATDKFAKLPTHDTDNARGKIATIGQLLIGLQANAMRSDLRNLDIKTPFGLLQIGTGITLDLDTSIIYQSPTGLFEREVPLTDL

SEQ ID NO: 1004 - protein, 1360 aa, Lactobacillus casei
MTKLGKPYGIGVDIGSNSIGFAAVDENSHLIRLKGKTVIGARLFEEGKAAADRRASRTTRRRLSRNRWRLSFLRDFFESHITPTDPNFFMRQKYSEISPKDKARYKYEKRLFNDRTDAEFYQQYPTMYHLRTRLLTDPSKADVREIYFAIHHILKSRGHFLTPGYAKDFNTNKVALNEIFPALQDAYAQVYPDLDITFDENKVNEFKTVLLNEKATPSDTQRALVNLLLAEDGDKDILKQQKQVLTEFAKAVVGLKTKLNVALGTEVDSSEATVWNFSLGQLDDKWAGIESAMTDEGTEILDQIRDLYRARLLNGIVPAGKTLSQAKVDDYAQHHEDLELFKDYLKQLEDDGTAKAIRQLYDRYIDGDDAKPFVREDFVKALTKEVTAHPNAKSPELLERLAQPDFMLKQRNKANGAIPVQMQQRELDQIIKNQSVYYDWLAAPNPVEKHRKSMPYQLDELLNFRIPYYVGPLVTAKEQKAAQGGVFAWMVRKDPDGNITPYNFDEKVDREASANTFIQRMKTTDTYLIGEDVLPKQSLLYQSYEVLNELNNVRVNDNKLSFDQKQQVLGELFERHNTVTIKQFVDNLLAHGDYDRIPEVRGLADEKRFLSSLSTYNQLKGILHEAIDDADKQTDIENIIAWSTIFEDKAIFKTKLNEISWLNAGMINSLANIRYRGWGQFSHKLLNELTLSTGRTVFEELLISSRNLMQILTDEVLKQKIAELNAHELKASGIYAAIDDAYTSPSNKKALRQVLSVIDDITNAAGQAPNWLYIETADGDGVPGKRTNSRQRKIQEIYANAAQELITGSVRGELEDKIASRADFTDRLVLYFMQGGRDIYTGEPLNIDNLSSYDIDHILPQSLIKDNSLDNRVLVHPLVNREKDTIFASTRFAKQMNGMWRQWHAAGLISSRKLRNLQMRPDEIDKYASGFVARQLVETRQIIKLTEQIVADQYPDTKIIAVKAGLSSQLRKELDFPKNREVNHYHHAFDAFLAARIGTYLLKRYPNLEPFFTYGKFKKTEVKKLKSFNFIRDMTHAKDKIVAKETGEIVWDNASDINELDRIYNFKRMLITHEVRFETASLFKQTLYAAKNSKNRGGSRQLIPKKKGYLVDIYGGYTQETGSYLSVVRLTKKAMYAVVKVSTRDAAKLAVAKSISEQKENETLKKIIDGKLSKTSKKGKTTHQLFEIVLPRVGQKTLFKNSKYNQFLVNSDTYMHNYQELWMPREYQRMWKDILLSNHGDAQLEGQLDQIFKFIVSQVNSYFNLYDINQFRKKIADATDKFAKLPTHDTDNARGKIATIGQLLIGLQANAMRSDLRNLDIKTPFGLLQIGTGITLDLDTSIIYQSPTGLFEREVPLTDL

SEQ ID NO: 1005 - protein, 700 aa, Lactobacillus casei
MTKLGKPYGIGVDIGSNSIGFAAVDENSHLIRLKGKTVIGARLFEEGKAAADRRASRTTRRRLSRNRWRLSFLRDFFESHITPTDPNFFMRQKYSEISPKDKARYKYEKRLFNDRTDAEFYQQYPTMYHLRTRLLTDPSKADVREIYFAIHHILKSRGHFLTSGYAKDFNTNKVALNEIFPALQDAYAQVYPDLDITFDENKVNEFKTVLLDEKATPSDTQRALVNLLLAEDGDKDILKQQKQVLTEFAKAVVGLKTKLNVALGTEVDSSEATAWNFSLGQLDDKWAGIESAMTDEGTEILDQIRDLYRARLLNGIVPAGKTLSQAKVDDYEQHHEDLELFKDYLKQLEDDGMAKAIRQLYDRYIDGDDAKPFVREDFVKALTKEVTAHPNAKSPELLERLVQPDFMLKQRNKANGAIPVQMQQRELDQIIKNQSVYYDWLAAPNPVEKHRQSMPYQLDELLNFRIPYYVGPLVTAKEQKAAQGGVFAWMVRKDPDGNITPYNFDEKVDREASANTFIQRMKTTDTYLIGEDVLPKQSLLYQSYEVLNELNNVRVNDNKLSFDQKQQVLGELFERHNTVTIKQFVDNLLAHGDYDRIPEVRGLADEKRFLSSLSTYNQLKGILHEAIDDSDKQTDIEKIIAWSTIFEDKAIFKTKLNEISWLNAGMINSLANIRYRGWGQFSHKLLNELTLSTGRTVFEA

SEQ ID NO: 1006 - protein, 330 aa, Lactobacillus casei
MTKLGKPYGIGVDIGSNSIGFAAVDENSHLIRLKGKTVIGARLFEEGKAAADRRASRTTRRRLSRNRWRLSFLRDFFESHITPTDPNFFMRQKYSEISPKDKNRYKYEKRLFNDRTDAEFYQQYPTMYHLRNRLLTDPSKADVREIYFAIHHILKSRGHFLTPGDAKDFNTNKVALNEIFPALQDAYAQVYPDLDITFDENKMNEFKTVLLNEKATPSDTQRALVNLLLAEDGDKDILKQQKQVLTEFAKAVVGLKTKLNVALGTEVDSSEATAWNFSLGQLDDKWAGIESAMTDEGTEILDQIRDLYRARLLNGIVPAGKTLSQAKVDD

SEQ ID NO: 1007 - protein, 330 aa, Lactobacillus casei
MTKLGKPYGIGVDIGSNSIGFAAVDENSHLIRLKGKTVIGARLFEEGKAAADRRASRTTRRRLSRNRWRLSFLRDFFESHITPTDPNFFMRQKYSEISPKDKNRYKYEKRLFNDRTDAEFYQQYPTMYHLRNRLLTDPSKADVREIYFAIHHILKSRGHFLTPGDAKDFNTNKVALNEIFPALQDAYAQVYPDLDITFDENKMNEFKTVLLNEKATPSDTQRALVNLLLAEDGDKDILKQQKQVLTEFAKAVVGLKTKLNVALGTEVDSSEATAWNFSLGQLDDKWAGIESAMTDEGTEILDQIRDLYRARLLNGIVPAGKTLSHAKVDD

SEQ ID NO: 1008 - protein, 1361 aa, Lactobacillus casei
MTKLGKPYGIGVDIGSNSIGFAAVDENSHLIRLKGKTVIGARLFEEGKAAADRRASRTTRRRLSRNRWRLSFLRDFFESHITPTGPNFFMRQKYSEISPKDKARYKYEKRLFNDRTDAEFYQQYPTMYHLRNRLLTDPSKADVREIYFAIHHILKSRGHFLTSGYAKDFNTNKVALNEIFPALQDAYAQVYPDLDITFDENKVNEFKTVLLNEKATPSDTQRALVNLLLAEDGDKDILKQQKQVLTEFAKAVVGLKTKLNVALGTEVDSSEATVWNFSLGQLDDKWAGIESAMTDEGTEILDQIRDLYRARLLNGIVPAGNTLSQAKVDDYAQHHEDLELFKDYLKQLEDDGTAKAIRQLYDRYIDGDDAKPFVREDFVKALTKEVTAHPNAKSPELLERLAQPDFMLKQRNKANGAIPVQMQQRELDQIIKNQSVYYDWLAAPNPVEKHRKSMPYQLDELLNFRIPYYVGPLVTAKEQKAAQGGVFAWMVRKDPDGNITPYNFDEKVDREASANTFIQRMKTTDTYLIGEDVLPKQSLLYQRYEVLNELNNVRVNNEKLSIEQKQQVIRELFERHNSVTIKQFAENLRAHGDYAHIPEIRGLADEKRFLSSLSTYRQLKSLLPDAIDDPAKQADIENIIAWSTVFEDAAIFKTKLKEINWLDSQTITKLSNIRYRGWGQFSHKFLNGLTLGNGHTIIQELFLSNNNLMQILTDETLQKKMTELNADKLKAANINDAIDDAYTSPSNKKALRQVLRVIEDIKRAADGQDPSWLYVETADGGGTPGKRTRARQHQLQEIYANAAHELIDSAVRGELEDKIADKADFNDRLVLYFMQGGRDIYTGTPLNIDQLSSYDIDHILPQSLIKDNSLDNRVLVHAIINREKNATFASTIYAQKMNATWRQWHEAGLISGRKLRNLQMRPDQIDKYASGFVARQLVETRQIIKLTEQIVAAQYPETKIIAVKAGLSHQLREELEFPKNRDVNHYHHAFDAFLAARIGTYLLKRFPNLQAFFTYGKFKKADVKKLRGFNFIRDITHAEDKIVVKDTGEVIWDKKRDVDELDRIYNFKRMLITHEVHFEKADLFKQTVYGAKDSKEAGGKKQLISKKKGYPVDIYGGYTQETGSYLSVVRLTKKAMYAVVKVSTRDAAKLAVAKSISEQKENETLNDIIDEKLSKISKNGKITHELFEVVLPRVGQKTLFKNSKYNLFLVNSDTYMHNYQELWMPREYQKMWKDISLSKYGDAQTEDQLDQIFGFIVSQVNSYFNLYDINQFRKKLNDAADKFATLPMRDTDDMQGKIATIGQLLIGLQANAARSDLRNLDIKTPLGLLQIPNGISLDSDTSVVYQSPTGLLEREVHLSDL

SEQ ID NO: 1009 - protein, 1128 aa, Lactobacillus casei
MTKLGKPYGIGVDIGSNSIGFAAVDENSHLIRLKGKTVIGARLFEEGKAAAKRRAGRTTRRRLSRNRWRLSFLRDFFESHITPTDPNFFMRQKYSEISPKDKARYKYEKRLFNDRTDAEFYQQYSTMYHLRNRLMTDPSRADVREIYFAIHHILKSRGHFLTPGDAKDFNTNDVALDEIFPALQDAYAQVYPDLGITFDEDKANEFKTILLNEIATSIDTQRALVKLLLAEEDDKDILKQQKQVLTEFAKAVVGLKTKLNLALGTEVDSSEATAWNFSLGQLDDKWAGIESAMTDEGTEILDQIRDLYRARLLNGIVPTGKTLSQAKVDDYTQHHEDLQLFKAYLKQLEDDGTAKAIRQLYDRYIDGDDAAPFLRENFVKALTKDVTAHPNTKSPELLERLAQPDFMLKQRNKANGAIPVQMQQRELDQIIKNQAVYYDWLAAPNPVEKHRKSMPYQLDELLNFRIPYYVGPLVTAKEQKAAQGGVFAWMVRKDPEGNITPYNFDEKVDREASANTFIQRMKTTDTYLIGEDVLPKQSLLYQRYEVLNELNNVRVNNEKLSIEQKQQVIRELFERHNSVTIKQFAENLRAHGDYAHIPEIRGLADEKRFLSSLSTYRQLKSLLPEAIDDPAKQADIENIIAWSTVFEDAAIFKTKLKEISWLGSEAITKLSNIRYRGWGQFSRKFLNGLTLGNGHTIIQELLLSTNNLMQILTDETLQKKMTELNADKLKTANINDAIDNAYTSPSNKKALRQVLRVVDDIKRAADGQDPSWLYVETADGGGTPGKRTRARQHQLQEIYANAAHELIDTAVRGELEDKISDKADFNDRLVLYFMQGGRDIYTGAPLNIDQLSSYDIDHILPQSLIKDNSLDNRVLVHAIINREKNATFASTIYAQKMNATWRQWHEAGLISGRKLRNLQMRPDQIDKYASGFVARQLVETRQIIKLTEQIVAAQYPDTKIIAVKAGLSHQLREELEFPKNRDVNHYHHAFDAFLAARIGTYLLKRFPNLQAFFTYGKFTKADVKKLRGFNFIRDITHAEDKIVAKDTGEVVWDKQRDVDELDRIYNFKRMLITHEVRFETADLFKQTVYGARDSKEAGGSKQLIPKKKDIQLIFMGAISERTRPILPL

SEQ ID NO: 1010 - protein, 1366 aa, Lactobacillus casei
MTKLGKPYGIGVDIGSNSIGFAAVDENSHLIRLKGKTVIGARLFEEGKAAAYRRASRTTRRRLSRNRWRLSFLRDFFESHITPTDPNFFMRQKYSEISPKDKARYKYEKRLFNDRTDAEFYQQYPTMYHLRTRLLTDPSKADVREIYFAIHHILKSRGHFLTPGYAKDFNTNKVALNEIFPALQDAYAQVYPDLDITFDENKVNEFKTVLLNEKATPSDTQRALVNLLLAKEGDRDILKQQKQVLTEFAKAVVGLKTKLNVALGTEVDSSEATAWNFSLGQLDDKWAGIESAMTDEGTEILDQIRDLYRARLLNGIVPAGKTLSQAKVDDYAQHHEDLELFKDYLKQLEDDGTAKAIRQLYDRYIDGDDAKPFVREDFVKALTKEVTAHPNAKSPELLERLAQPDFMLKQRNKANGAIPVQMQQRELDQIIKNQAVYYDWLAAPNPVEKHRQSMTYQLDELLNFRIPYYVGPLVTAKEQKAAQGGVFAWMVRKDPDGNITPYNFDEKVDREASANTFIQRMKTTDTYLIGEDVLPKQSLLYQSYEVLNELNNVRVNDNKLSFDQKQQVLGELFERHNTVTIKQFVDNLLAHGDYDRIPEVRGLADEKRFLSSLSTYNQLKGILHEAIDDADKQTDIENIIAWSTIFEDKAIFKTKLNEISWLNAGMINSLANIRYRGWGQFSHKLLNELTLSTGRTVFEELLISSRNLMQILTDEVLKQKIAELNAHELKASGIYAAIDDAYTSPSNKKALRQVLSVIDDITNAAGQAPNWLYIETADGDGVPGKRTNSRQRKIQEIYANAAQELITGSVRGEFEDKIASRADFTDRLVLYFMQGGRDIYTGEPLNIDNLSSYDIDHILPQSLIKDNSLDNRVLVHPLVNREKDTIFASTRFAKQMNGMWRQWHAAGLISSRKLRNLQMRPDEIDKYASGFVARQLVETRQIIKLTEQIVADQYPDTKIIAVKAGLSSQLRKELDFPKNREVNHYHHAFDAFLAARIGTYLLKRYPNLEPFFTYGKFKKTEVKKLKSLKSLKSFNFIRDMTHAKDKIVAKETGEIVWDNASDINELDRIYNFKRMLITHEVRFETASLFKQTLYAAKNSKNRGGSRQLIPKKKGYLVDIYGGYTQETGSYLSVVRLTKKAMYAVVKVSTRDAAKLAVAKSISEQKENETLKKIIDGKLSKTSKKGKTTHQLFEIVLPRVGQKTLFKNSKYNQFLVNSDTYMHNYQELWMPREYQRMWKDILLSNHGDAQIEGQLDQIFKFIVSQVNSYFNLYDINQFRKKIADATDKFAKLPTHDTDNARGKIATIGQLLIGLQANAMRSDLRNLDIKTPFGLLQIGTGITLDLDTSIIYQSPTGLFEREVPLTDL

SEQ ID NO: 1011 - protein, 1354 aa, Lactobacillus coryniformis
MTLHYNVGLDIGTNSVGYTIVDDNGKILQVKGKNGYGVRVFKEGATAAERRIFRTTHRRLKRRKWRLRLLQDFFEPYILPQDDGFFIRRKESNLVLNDRDEDTASLFNDRSDRDFYQAYPTIYHLRQALMTEKRQFDVREIYLAMHHIIKYRGHFLLNGTVNNFTNNKIDLHSDFEELNALLLNVIPELKFQIDLDHSTMFQTTLLNTTISRSGRQRDLVKSFYNGSDDKQLAKQQKSVATELLKAILGLKAKFHKLFNLDLLETTEWEFSFDAEDIDDKLAKLEPLMTENQQQVMDILQRIFAAITLNGIVPEGKTLSASKVDSYQKHKQDLKLLKAIAQHSDKKTATVLQTAYNEYINGIASKPLKQEDFYKRLTNAVKKSSDPQVADMLALIDQEKFLPKQRTKENGAIPHQLHQLELERIIDNQKDYYPWLAELNPNQARQKVAKYKLSELVAFRVPYYVGPLIEPEVQQATSNAHFAWMARKEAGPITPWNFDQKVDRNVSAERFIKRMTTKDTYLLAEDVLPLHSLLYQRFIVLNELNNVRVNGQKLTKKQKQAVYQDLFKRQPHVTKKQFKSYLVQTGEFAESSKIEGLANETSFNSGLTTENELRKIFGAQLDEARYQVDFEQIIEWATLFEDAKILRTKLAEITWLTTEQIEKLAGIRYRGWGRFSRKLLAGLRDQNGQQIIDLLWDTPNNFMVIVSQAAFSEAITKENEKLIDRRGAQDVITDLYTSPQNKKALRQVLAIVADVQKAMGGVPPQRIFIEFAREDEKNPRRSVERSRQLEKLYQTISNEFLINSEVRQELKEAVDQKVNFKDRLFLYFLQGGVDLYSGKRINIDQLSHYDIDHILPQSFIKDDSLDNRVLVSQKLNRSKSDSVPLSEFANYKFGPAMQAKWLQLKEAGLLSKRKYDNLTLDPTKLSKFAPLGFVNRQLVETRQVIKLAANLLASEETKVVTIKANMTHQVRKELDFPKNRNVNNYHHAFDAYLTAFVGIFLSKRYPKLKPYFTYGDFQKGNKLPDLKNFNFLYELKNKDRSIDSNTGEIIWDKQRDLAYMNKIYNFKKVTVVHEVLTKSGALYNQTLYKASEDKASGRGTKQLIRKKDNMPTELYGGYTGSTSAFMSIVRLWKKDKPYYKVVGIPTRMAAKLANQAQLLDYLTKKFTTRKLVKKTGDYKTTVERFELVVPKVGFNQLVIDGGQPFMLGSATYQYNARELFISKEAVKALNKQLSTHVDLVQVFDEILVQVNRWFPLYDTNGFREKLSHGRDRFMKLNDSFEEKSDTQIDVLNRILIGFHANAARTNLKILGLGTDLGFMTQQAGIRLTEKAILVHQSPSGLFERKVALRDLKGLR

SEQ ID NO: 1012 - protein, 544 aa, Lactobacillus crispatus
KYYLYFMQLGRDAYTGKPINIDEVSQYYDIDHILPQSFIKDDSLNNRVLVAKPINNGKSDGVPLKLFGDNLATGLGITVKQMWNNWADKGLINKAKQNNLFLDPENINKHQASGFIRKQLVETSQIIKLATTILQAEYPKTKIIVVKASSNHYLRNEFDLYKSREVNDYHHAIDAYLTTICGNLLYQAYPKLRPFFVYGQFKKFSSDPKKENEILKKTKNFDFVAKLLGSKAPNEIRSQQGKVLFEKNKIRLQLNKAYNYKYMLVSRDTTTKNQEMFGMTIYPRAERDIAKSRKLIEKRKGFSTDIYGGYTGTAAAYMAIVRINKTKSSQYKVIAVPMTKRAILNKAEKEGNYEKILKQILSPSILYNDKGKRKAGVISFDIIKGKVPYNQVVQDGNKKFLLKSAIYLCNAKQLVLSEEAMRVITGHWLDSDKQDQELLDVYDEILEKIDRYLPLFDIRDFRNKLHKGREKFLKLNAEDKFKAIIQILKGLHDNSDTGELKDIGITVPFGQLQNNSGITLSSDTILVYQSPTGLFEKRVKISSL

SEQ ID NO: 1013 - protein, 298 aa, Lactobacillus crispatus
MDELNKISVNGKKLSVSVKQELYEDLFKKNNTVSAKQLKNWLIENQKLPYIKIKGLADQTKFNSSLSTYIKLKKSGLFVDKLDSNEFRDDFEKIIEWSTIFEDKQIYIQKLQTIDWLTAKQIQFLQNIRLQGWGRLSKKLLTAIVDSNGQNIIEQLWNSQQIFMSIVNKADIKGTITDANQDLMHSNSMEDILSEAYTSPANKKMIRQVVKVVHDIQKAASGQAPKQIAIEFARESRRNSKLSQTRGHKLQDIYQKISGDIVNKNLKDKLAEYIKNNQLSVWEKTSFQMNKNDQDFLF

SEQ ID NO: 1014 - protein, 279 aa, Lactobacillus crispatus
MNGKKLSVSVKQELYEDLFKKNNTVSAKQLKNWLIENQKLPYIKIKGLADQTKFNSSLSTYIKLKKSGLFVDKLDSNEFRDDFEKIIEWSTIFEDKQIYIQKLQTIDWLTAKQIQFLQNIRLQGWGRLSKKLLTAIVDSNGQNIIEQLWNSQQIFMSIVNKADIKGTITDANQDLMHSNSMEDILSEAYTSPANKKMIRQVVKVVHDIQKAASGQAPKQIAIEFARESRRNSKLSQTRGHKLQDIYQKISGDIVNKNLKDKLAEYIKNNQLNKDKYYTR

SEQ ID NO: 1015 - protein, 538 aa, Lactobacillus crispatus
MQLGRDAYTGKPINIDEVSQYYDIDHILPQSFIKDDSLNNRVLVAKPINNGKSDGVPLKLFGDNLATGLGITVKQMWNNWADKGLINKAKQNNLFLDPENINKHQASGFIRKQLVETSQIIKLATTILQAEYPKTKIIVVKASSNHYLRNEFDLYKSREVNDYHHAIDAYLTTICGNLLYQAYPKLRPFFVYGQFKKFSSDPKKENEILKKTKNFDFVAKLLGSKAPNEIRSQQGKVLFEKNKIRLQLNKAYNYKYMLVSRDTTTKNQEMFGMTIYPRAERDIAKSRKLIEKRKGFSTDIYGGYTGTAAAYMAIVRINKTKSSQYKVIAVPMTKRAILNKAEKEGNYEKILKQILSPSILYNDKGKRKAGVISFDIIKGKVPYNQVVQDGNKKFLLKSAIYLCNAKQLVLSEEAMRVITGHWLDSDKQDQELLDVYDEILEKIDRYLPLFDIRDFRNKLHKGREKFLKLNAEDKFKAIIQILKGLHDNSDTGELKDIGITVPFGQLQNNSGITLSSDTILVYQSPTGLFEKRVKISSL

SEQ ID NO: 1016 - protein, 206 aa, Lactobacillus crispatus
MQLGRDAYTGKPINIDEVSQYYDIDHILPQSFIKDDSLNNRVLVAKPINNGKSDGVPLKLFGDNLATGLGITVKQMWNNWADKGLINKAKQNNLFLDPENINKHQASGFIRKQLVETSQIIKLATTILQAEYPKTKIIVVKASSNHYLRNEFDLYKSREVNDYHHAIDAYLTTICGNLLYQAYPKLRPFFVYGQFKKFSSDPKKRK

SEQ ID NO: 1017 - protein, 857 aa, Lactobacillus crispatus
MTKLNNEYMVGLDIGTNSCGWVATDFDNNILKMHGKRALGSHLFDEGVSAADRRAFRTTRRRIKRRKWRLKLLEEIFDEEMAKVDPNFFARLKESGLSPLDTRKNVSSIVFPTKKMDKQFYKKFPTIYHLRNALMKQDKKFDLRAIYIAIHHIVKYRGNFLSNSSISNFSASKIEIDRFVNELNDLYSIFLPESGVIFDAGNASKVEDIIRNEQMFKLDKIKEIADVLPDTENKSGLKLSKKISKEISKAILGYKAKFEIILQVNVDKTDSSIWNFKLNDENADVNLSEITSDLTDTQLQILDLVRNLFSAISLLNIVDEGSTLSESMIRKYNDHAQDLKLLKTVIKNHSDRKKAHNLQLAYDKYVNNRHFVDVETKKAFPNKHLYRKSDFYEIVKKNLDASKEAVQIRKEIALDKFMPKQRSDENGVIPFQLNQIELDKIIENQGKYYPFLKEINPIKAHRMQAPYKLDELIRFRVPYYVGPMIEPTNSSYPQTRQNQSFAWMVRKAKGRITPWNFDEKVDRQKSANNFIKRLTTKDTYLFGEDVLPANSLLYQKYTVLDELNKISVNGKKLSVSVKQELYEDLFKKNNTVSAKQLKNWLIENQKLPYIKIKGLADQTKFNSSLSTYIKLKKSGLFVDKLDSNEFRDDFEKIIEWSTIFEDKQIYIQKLQTIDWLTAKQIQFLQNIRLQGWGRLSKKLLTAIVDSNGQNIIEQLWNSQQIFMSIVNKADIKGTITDANQDLMHSNSMEDILSEAYTSPANKKMIRQVVKVVHDIQKAASGQAPKQIAIEFARESRRNSKLSQTRGHKLQDIYQKISGDIVNKNLKDKLAEYIKNNQLSVWEKTSFQMNKNDQDFLF

SEQ ID NO: 1018 - protein, 857 aa, Lactobacillus crispatus
MTKLNNEYMVGLDIGTNSCGWVATDFDNNILKMHGKRALGSHLFDEGVSAADRRAFRTTRRRIKRRKWRLKLLEEIFDEEMAKVDPNFFARLKESGLSPLDTRKNVSSIVFPTKKMDKQFYKKFPTIYHLRNALMKQDKKFDLRAIYIAIHHIVKYRGNFLSNSSISNFSASKIEIDRFVNELNDLYSIFLPESGVIFDAGNASKVEDIIRNEQMFKLDKIKEIADVLPDTENKSGLKLSKKISKEISKAILGYKAKFEIILQVNVDKTDSSIWNFKLNDENADVNLSEITSDLTDTQLQILDLVRNLFSAISLLNIVDEGSTLSESMIRKYNDHAQDLKLLKTVIKNHSDRKKAHNLQLAYDKYVNNRHFVDVETKKAFPNKHLYRKSDFYEIVKKNLDASKEAVQIRKEIALDKFMPKQRSDENGVIPFQLNQIELDKIIENQGKYYPFLKEINPIKAHRMQAPYKLDELIRFRVPYYVGPMIEPTNSSYPQTRQNQSFAWMVRKAKGRITPWNFDEKVDRQKSANNFIKRLTTKDTYLFGEDVLPANSLLYQKYTVLDELNKISVNGKKLSVSVKQELYEDLFKKNNTVSAKQLKNWLIENQKLPYIKIKGLADQTKFNSSLSTYIKLKKSGLFVDKLDSNEFRDDFEKIIEWSTIFEDKQIYIQKLQTIDWLTAKQIQFLQNIRLQGWGRLSKKLLTAIVDSNGQNIIEQLWNSQQIFMSIVNKADIKGTITDANQDLMHSNSMEDILSEAYTSPANKKMIRQVVKVVHDIQKAASGQAPKQIAIEFARESRRNSKLSQTRGHKLQDIYQKISGDIVNKNLKDKLAEYIKNNQLSVWEKNSFQMNKNDQDFLF

SEQ ID NO: 1019 - protein, 347 aa, Lactobacillus crispatus
MVNLKSLVLILKKENEILKKTKNFDFVAKLLGSKAPNEIRSQQGKVLFEKNKIRLQLNKAYNYKYMLVSRDTTTKNQEMFGMTIYPRAERDIAKSRKLIEKRKGFSTDIYGGYTGTAAAYMAIVRINKTKSSQYKVIAVPMTKRAILNKAEKEGNYEKILKQILSPSILYNDKGKRKAGVISFDIIKGKVPYNQVVQDGNKKFLLKSAIYLCNAKQLVLSEEAMRVITGHWLDSDKQDQELLDVYDEILEKIDRYLPLFDIRDFRNKLHKGREKFLKLNAEDKFKAIIQILKGLHDNSDTGELKDIGITVPFGQLQNNSGITLSSDTILVYQSPTGLFEKRVKISSL

SEQ ID NO: 1020 - protein, 534 aa, Lactobacillus crispatus
RDAYTDKPINIDEVSQYYDIDHILPQSFIKDDSLNNRVLVAKPINNGKSDGVPLKLFGDNLATGLGITVKQMWNNWADKGLINKAKQNNLFLDPENINKHQASGFIRKQLVETSQIIKLATTILQAEYPKTKIIVVKASSNHYLRNEFDLYKSREVNDYHHAIDAYLTTICGNLLYQAYPKLRPFFVYGQFKKFSSDPKKENEILKKTKNFDFVAKLLGSKAPNEIRSQQGKVLFEKNKIRLQLNKAYNYKYMLVSRDTTTKNQEMFGMTIYPRAERDIAKSRKLIEKRKGFSTDIYGGYTGTAAAYMAIVRINKTKSSQYKVIAVPMTKRAILNKAEKEGNYEKILKQILSPSILYNDKGKRKAGVISFDIIKGKVPYNQVVQDGNKKFLLKSAIYLCNAKQLVLSEEAMRVITGHWLDSDKQDQELLDVYDEILEKIDRYLPLFDIRDFRNKLHKGREKFLKLNAEDKFKAIIQILKGLHDNSDTGELKDIGITVPFGQLQNNSGITLSSDTILVYQSPTGLFEKRVKISSL

SEQ ID NO: 1021 - protein, 278 aa, Lactobacillus crispatus
SVNGKKLSVSVKQELYEDLFKKNNTVSAKQLKNWLIENQKLPYIKIKGLADQTKFNSSLSTYIKLKKSGLFVDKLDSNEFRDDFEKIIEWSTIFEDKQIYIQKLQTIDWLTAKQIQFLQNIRLQGWGRLSKKLLTAIVDSNGQNIIEQLWNSQQIFMSIVNKADIKGTITDANQDLMHSNSMEDILSEAYTSPANKKMIRQVVKVVHDIQKAASGQAPKQIAIEFARESRRNSKLSQTRGHKLQDIYQKISGDIVNKNLKDKLAEYIKNNQLNKDKYY

SEQ ID NO: 1022 - protein, 277 aa, Lactobacillus crispatus
SVNGKKLSVSVKQELYEDLFKKNNTVSAKQLKNWLIENQKLPYIKIKGLADQTKFNSSLSTYIKLKKSGLFVDKLDSNEFRDDFEKIIEWSTIFEDKQIYIQKLQTIDWLTAKQIQFLQNIRLQGWGRLSKKLLTAIVDSNGQNIIEQLWNSQQIFMSIVNKADIKGTITDANQDLMHSNSMEDILSEAYTSPANKKMIRQVVKVVHDIQKAASGQAPKQIAIEFARESRRNSKLSQTRGHKLQDIYQKISGDIVNKNLKDKLAEYIKNNQLNKDKY

SEQ ID NO: 1023 - protein, 1368 aa, Lactobacillus curvatus
MSRPYNIGLDIGTSSIGWSVVDDQSKLVSVRGKYGYGVRLYDEGQTAAERRSFRTTRRRLKRRKWRLGLLREIFEPYITPIDDTFFLRQKQSNLSPKDQRKLYTQTSLFNDRTDRAFYDDYPTIYHLRYRLMTEKRQFDIREIYLAMHHIVKYRGHFLNEAPVSSFKSSEINLVAHFDRLNTIFADLFSESGFQLETDKLAEVKALLLDNQQSASNRQRQALSLIYTPSTNKAVEKQNKAIATELLKAILGLKAKFNVLTGIEAEDVKAWTLTFNAENFDEEMVKLESSLDDNAHQIIESLQELYSGVLLAGIVPENQSLSQAMITKYDDHQKHLKMLKAVREALAPGDRQRLKQAYDQYVDGQENTKAYSKEDFYGDITKALKNNPDHPIVSEIKKLIELDQFMPKQRTKDNGAIPHQLHQQELDRIIENQQQYYPWLAELNPNSKRQTVAKYKLDELVAFRVPYYVGPLITAEQQRQSSDAKFAWLIRKAEGRITPWNFDDKVDRQASANEFIKRMTTTDTYLLAEDVLPKQSLIYQRFEVLNELNGLKIDDQPITTELKQAIFTDLFMQKISVTVKNIQDYLVSEKRYASRPAITGLSDENKFNSRLSTYHDLKMIVGDAVDDVDKQADLEKCIEWSTIFEDGKIYSAKLNEIDWLTDQQRVQLAAKRYRGWGRLSAKLLTQIVNANGQRIMDLLWDTTDNFMRIVHSEDFDKLITEANQMMLAENDVQDVINDLYTSPQNKKALRQILLVVNDIQKAMKGQAPERILIEFAREDEVNSRLSVQRKRQVEQVYQNISNELLNNTEIRNELKDLSNSALSNTRLFLYFMQGGRDMYTGDSLNIDRLSTYDIDHILPQSFIKDNSLDNRVLVSQKMNRSKADQVPTDFTSVELGQKMQIQWEQMLRAGLITKKKYDNLTLNPDHISKYAMKGFINRQLVETRQVIKLATNLLMEQYGEDNIELITVKSGLTHQMRTEFDFPKNRNLNNHHHAFDAYLTAFVGLYLLKRYPKLKPYFVYGEYQKASQQDKWRNFNFLNGLKKDELVDENTEAVIWDKESGLAYLNKIYQFKKILVTRGVHENSGALFNQTLYAAKDDKASGQGGKQLIPAKQDRSTALYGGYSGKTVAYMCIVRIKNKKGDLYKVCGVETSWLAQLKQLTDEDSQKAFLEQKISPQFTKVKKQKGNIIEAVEEFEVIAPHILINQRFFDNGQELTLGSATYKHNEQELILDKTAVKLLNGALPLTQSEELAEQVYDEILDQVMHYFPLYDTNQFRAKLSTGKAAFMKLPWKSQWDGNKMVQVGQQVILDRILIGLHANAAMSDLKVLKMTTPFGMIQQSTGITLSADTQIIYQSPTGLFERRVALRDL

SEQ ID NO: 1024 - protein, 669 aa, Lactobacillus delbrueckii
MAKPKDYTIGLDIGTNSVGWVVTDDQNNILRIKGKKAIGARLFTEGKVAAERRSFRTTRRRLSRRRWRIKMLEELFDEEIAKVDPSFFARLHESWISPKDKRKRYSAIVFPSPEEDKKFHESYPTIYHLRDKLMKDDQKHDIREIYIAVHQMIKARGNFLHDESVETYRSGMSSLGGRSERNILSVQTLEELNDLFAENEGTEEVELNVASAEQINDILTGGHLNADSQKEISNLLLPSSFPSFDDKAKEKQVKKLINNVATNISKAWLGYKADFSTILNLAKVDKDQKKIFAFALQGGDEEDKVQELESLLEQSQTDIVDRLIEIRHAIVLSEIVPVGMTLSEAMIDKYDQHKEDLITLKAVIRNTKDKKKAAKLQAIYDLYVKKRHADLAKAMKLTGIKKRSELLDPEELKKGISSLLDDSPEAVEIKQRLEEKTFLPLQRSNNNGVIPNQLHQVELDEIIKKQSKYYPFLAEKNPDESEEAQKKAPTKLDALLTFRVPYYVGPMITKEEQEAQNGHSFAWMVRRDPQDHEAITPWNFEKKVDKMASATQFIKRMTTKDTYLLGEDVLPASSLKYQLFTVLNELNNLRVNGKKLTSDEKEQVIEGLFKKQKTVKADKFVKYWQAKHIGADIKVKGLSDPSKFNSTMSTYIDFKKIFGDQLNDVNRQR

SEQ ID NO: 1025 - protein, 544 aa, Lactobacillus delbrueckii
MTGCADYDVDHIMPQSFVKDDSLDNRVLVARAVNNQKSDKVPALLFGNKVVADLGITVREMWDKWQKLGMISKRKLSNLLTDPDALTEYRAQGFIRRQLVETSQVIKLTATILQSEFPDSKIIEVPAKYNSIVRKQFDLYKSREVNDFHHAIDAYLSTIVGNYLYQVYPNLRRMFVYGEFKKFSSNAEESAHDVARRVKSMNFLDDLLRGTHGDNIYCRSTGEIVFNRNDIISKLKQAYSFKQMLVTQEVFTKKSALFDQTVYPSPERDSKKRSGLIPRKKGMDTEIYGGYSGNKDAYFVLAEAVKEKGHTLQIVGVPIRALNTLKNSANYSEKLLEIIKPQVMFNKDTGKPIKGIKDVKILMDKIPCRQPVLEGESYYMLASSKYRYSLKQISLSQMSMKYILDYIDDPNFNKHEMINIDQQDEKECLLSVYDEILEKMDKYLPLFDIRSFRKKLHDGRDAFIALPVASEEKKPGEVDVIRKILKGLHANADITNLAELGFGTAALGALVSTGGIKISDDAVFIYQSPTGLFERRVKVSDLLK

SEQ ID NO: 1026 - protein, 1356 aa, Lactobacillus farciminis
MTKKEQPYNIGLDIGTSSVGWAVTNDNYDLLNIKKKNLWGVRLFEEAQTAKETRLNRSTRRRYRRRKNRINWLNEIFSEELAKTDPSFLIRLQNSWVSKKDPDRKRDKYNLFIDGPYTDKEYYREFPTIFHLRKELILNKDKADIRLIYLALHNILKYRGNFTYEHQKFNISNLNNNLSKELIELNQQLIKYDISFPDDCDWNHISDILIGRGNATQKSSNILKDFTLDKETKKLLKEVINLILGNVAHLNTIFKTSLTKDEEKLNFSGKDIESKLDDLDSILDDDQFTVLDAANRIYSTITLNEILNGESYFSMAKVNQYENHAIDLCKLRDMWHTTKNEEAVEQSRQAYDDYINKPKYGTKELYTSLKKFLKVALPTNLAKEAEEKISKGTYLVKPRNSENGVVPYQLNKIEMEKIIDNQSQYYPFLKENKEKLLSILSFRIPYYVGPLQSAEKNPFAWMERKSNGHARPWNFDEIVDREKSSNKFIRRMTVTDSYLVGEPVLPKNSLIYQRYEVLNELNNIRITENLKTNPIGSRLTVETKQRIYNELFKKYKKVTVKKLTKWLIAQGYYKNPILIGLSQKDEFNSTLTTYLDMKKIFGSSFMEDNKNYDQIEELIEWLTIFEDKQILNEKLHSSKYSYTPDQIKKISNMRYKGWGRLSKKILMDITTETNTPQLLQLSNYSILDLMWATNNNFISIMSNDKYDFKNYIENHNLNKNEDQNISDLVNDIHVSPALKRGITQSIKIVQEIVKFMGHAPKHIFIEVTRETKKSEITTSREKRIKRLQSKLLNKANDFKPQLREYLVPNKKIQEELKKHKNDLSSERIMLYFLQNGKSLYSEESLNINKLSDYQVDHILPRTYIPDDSLENKALVLAKENQRKADDLLLNSNVIDRNLERWTYMLNNNMIGLKKFKNLTRRVITDKDKLGFIHRQLVQTSQMVKGVANILDNMYKNQGTTCIQARANLSTAFRKALSGQDDTYHFKHPELVKNRNVNDFHHAQDAYLASFLGTYRLRRFPTNEMLLMNGEYNKFYGQVKELYSKKKKLPDSRKNGFIISPLVNGTTQYDRNTGEIIWNVGFRDKILKIFNYHQCNVTRKTEIKTGQFYDQTIYSPKNPKYKKLIAQKKDMDPNIYGGFSGDNKSSITIVKIDNNKIKPVAIPIRLINDLKDKKTLQNWLEENVKHKKSIQIIKNNVPIGQIIYSKKVGLLSLNSDREVANRQQLILPPEHSALLRLLQIPDEDLDQILAFYDKNILVEILQELITKMKKFYPFYKGEREFLIANIENFNQATTSEKVNSLEELITLLHANSTSAHLIFNNIEKKAFGRKTHGLTLNNTDFIYQSVTGLYETRIHIE

SEQ ID NO: 1027 - protein, 1313 aa, Lactobacillus fermentum
MHYLDEIFAPHLQEVDENFLRRLKQSNIHPEDPAKNQAFIGKLLFPDLLKKNERGYPTLIKMRDELPVEQRAHYPVTNIYKLREAMINEDRQFDLREVYLAVHHIMKYRGHFLNNASVDKFKVGRIDFYKSFNVLNEAYEELQNGEGSFTIEPSKVEKIGQLLLDTKMRKLNRQKAVAKLLEVKVADKEETKRNKQIATAMSKLVLGYKADFATVAMANGNEWKIDLSSETSEDEIEKFREELSDAQNDILTEITSLFSQIMLNEIVPNGMSISESMMDRYWTHERQLAEVKEYLATQPASARKEFDQVYNKYIGQAPKERGFDLEKGLKKILSKKENWKEIDELLKAGDFLPKQRTSANGVIPHQMHQQELDRIIEKQAKYYPWLATENPATGERDRHQAKYELDQLVSFRIPYYVGPLVTPEVQKATSGAKFAWAKRKEDGEITPWNLWDKIDRAESAEAFIKRMTVKDTYLLNEDVLPANSLLYQKYNVLNELNNVRVNGRRLSVGIKQDIYTELFKKKKTVKVSDVASLVMAKTRGVNKPSVEGLSDPKKFNSNLATYLDLKSIVGDKVDDNRYQTDLENIIEWRSVFEDGEIFADKLTEVEWLTDQQRSALVKKRYKGWGRLSKKLLTGIVDENGQRIIDLMWNTDQNFMQIVNQPVFKEQIDQLNQKAITNDGMTLREWVESVLDGAYTSPQNKKAIWQVVRVVEDIVKAVGNAPKSISIEFARNEGNKGEITRSRRTQLQKLFEDQAHELVKDTSLTEELEKAPDLSDRYYLYFTQGGKDMYTGDPINFDEISTKYDIDHILPQSFVKDDSLDNRVLVSRAENNKKSDRVPAKLYAAKMKPYWNQLLKQGLITQRKFENLTMDVDQNIKYRSLGFVKRQLVETRQVIKLTANILGSMYQEAGTDIIETRAGLTKQLREEFDLPKVREVNDYHHAVDAYLTTFAGQYLNRRYPKLRSFFVYGEYMKFKHGSDLKLRNFNFFHELMEGDKSQGKVVDQQTGELITTRDEVAKSFDRLLNMKYMLVSKEVHDRSDQLYGATIVTAKESGKLTSPIEIKKKRPVDLYGAYTNGTSAFMTIIKFTGNKPKYKVIGVPTTSAVGLKRVGKPGSESYNQELHRIIKSNPKVKKDFEIVVPHVSYSQLIVDDDCKFTLASDTYQHPATQLVLSKESMEIIADDFKFVKENTATADEQLVRVFDEIVNQMNHYFTIFDQRSNRQKVTKARDKFVSLPTESEYEGAKKTQVGKTEVITNLLMGLHANSAQGDLKVLGLSTFGFFQSSGGLNLSEDAMIVYQSPTGLFERRICLKDI

SEQ ID NO: 1028 - protein, 1327 aa, Lactobacillus florum
MTEQQQPYNIGLDIGTSSIGWAVTDQNDKLLHIRGHNGIGVRLFKEGESAAERRGFRTTRRRLSRRRWRLRFLDRIFDAELAKVDPNFLARLKQSNISPLDPNKQMFGNILFDDPQFDDQKFHQQYPTIYHLRSALAQPDAPQADVRLIYLALHHMIKFRGHFLNGAAVEKFHGGQLHLESEFQELNQIFSNQQRDHVQLQTSSLDEVATILKDNQRTPSDRQRELSARLFVPVDKTIDKENKKLATELLKAVLGLKAKFDVILGVEATDPQAFKLQFSSDDFDDKIAELASELTDEANEILTVLQRLYFSLNLADILTNRQTKQVADSISTAMINRYDDHKHHLKMLKELEAQVTQEQRDGLKKAYDEYIDGDKPTIDTFYTNIKKNLDDSELANQIKSLIDLQAFMPKQRSKENGSIPHQLHQRELDQLIEVQGKYYPWLLAAKDKLDALIAFRVPYYVGPMIDPNQSDDPQNTKFAWMVRKEAGEITPWNFEEKVDKTSSATNFIKRMTTTDTYLLGEPVLPKNSLLYQQFTVLNELNKLKVNGKALTVDQKKYLYEHVCKKQRRVTLKKLSDCLMARGDFPMGAIFTGTTDQKNMNNTLKTYQDFQEIFGDEIDNPDRQVDFEKMIEWSAIFEDREIFKLKLAELNWLTSEQLERVSKKRYQGWGRLSQKLLTHIVNENGERIIDQLWNTNQNFMEIMGQDSVKQAIQEHNGANVAQTGINETIDELYTSPQNKKAIRQILLVVDDIKKAVGYAPANIMMEFAREDRDDHRLIASRARQLEKTYQEISKNWFDNESVTQELKDQIKNKTKFTDRLYLYFIQGGIDLYTGHPLNIDQLSSYDIDHILPQSFLLDNSLNNRVLTSQAENRVHKEDRLPGETVANKMRPTWKMMREQGLMTQRKYNNLTLKPDQISKFNNRGQFINRQLVETRQVIKLAADIMSQKYQADQTKVVTVKANLTHHMREKFNFYKSRNVNDYHHAFDAYLTLFVGNWLLKEYPKLQPYFVYGDFAKTGTNNLKSFNFLYRFERDHKLNDKGAIDTDKDQQLGYMKRIYRFKKMLVTKQLETNEGALYGQTLYPAPKNDKKTRNLINSKKNRPSDIYGGYSNENGSFLTLVKLKKGSKYDYRLVAVPVSKISEIKESELATIEKAIAPQFLKSSGKYRDFQVVLSKILINQKVIDDGMIFTIGSKSYKHNAKQVVLSDNSIQIVSTLSRISDKEKLITVFDEIVDITSKYLPWYKVNDVEKTKMLFRQMQDIDEMKKIIDNSLIGLHCNASITDLGKVGLSKYWGRFVLTAGISLTVDAQLIYQSPTGLFEHRVKVSDL

SEQ ID NO: 1029 - protein, 1386 aa, Lactobacillus hominis
MTKITEDYIVGLDIGTNSCGWVAMDSKNTILRMHGKTAIGSHLFDAGNSAADRRAFRTTRRRIKRRKWRLKLLEEIFDSHLAKVDPYFFARLKESGLSPLDTRKNVSSIIYPTSLEDKKFYVDNPTIYHLRYKLMTEDRKFDLREVYLAIHHIVKYRGNFLYNTPVKAFEASKIDVKGSLKKLNELYEGLDSEFNVELDSNNALEIENIIRDKKIFKINKVKEINQLLSLKTEDKERTKLMKDVSKQIVNAILGYKTKFETILLKDVSKDEADDWEFKLTDVDADNKFENLIGDLNENEQEILLVIRKLANAITLSNIVEEGKTLSESMKDKYKKHSDDLKLLKQVISDHPDRDKAKKLALAYDLYVNNRHGKILQAKDILEKKKTLSKEDFYKEIKKNLDDSKESQEILDAISLDSFMPKQRTNENGVIPYQLHQLELDKIIENQGKYYPFLKEVNPVSSHLKQAPYKLDELIRFRVPYYVGPLISPNESTKNKQTKKNQNFAWMIRKEQGQITPWNFDQKVDRMASANKFIKRMTTIDTYLLGEDVLPANSLLYQKFTVLNELNNVKINGKRISVPLKQELYNNLFKKNSTVTTNKLKSYLKENYKLIKVEIKGLSDEKKFNSGLTTYNKLKNLKIFDQQIDDPNYNKDFERIIEWSTIFEDKAIYKEKLKTIDWLSDRQIDKLSKIRMQGWGQLSKKLLSQLTDNNGQTIIEQLWDSQNNFMQIVNQADFKDAIAVANQNLLVDTSVEDILNEAYTSPANKKAIRQVVKVVDDIVKATSGKVPKQIAIEFTRDADDNAKISQSRANKLRKVYKEMSNELASETIRNELERVAKDQKLLKDKHYLYFMQLGRDAYTGELIDIDNLEQYDIDHVLPQSFIKDDSLENRVLVKKAVNNGKSDNVPVKLYGNRMATDLGMTIRHMWEKWKEQGLITKTKYNNLIIDPDKINKYESSGFIHRQLVETSQIIKLVSTILQSKYPDTEIIVVKARYNHYLRKRLNLYKSREVNDYHHAIDAYLSAICGNLLYQVYPYLRPFFVYGQYKKFSSEPEKEKIIYDKTRRYNFISQIFENKDNDIISRETKKKVFDKKDIIEKLKRAYNYKYMLVSRETETHDQEMFKMTVYPRLSRDTKKSRNLIPKKKDMPTEIYGGYTNNSDAYMIIARINKKKGPEYRVFGVPMRELVNLRKAEKNGHYKAYLKQVLEPEIMYSKNGKKNKTISSFEIVKAKVPYKQVILDGDKKFMLASSTYVQNAKQLTLSQYSMQAITDNCENDTEEEKALVEAYDEILTNIDKYLPLFDINKFREKLHAGREKFVDLPLAEKKETILQVLNGLHDNAVMPKIKSLGLSTPLGFMQFHTGVSLSENAKLIYQSPTGLFEKRLKISDL

SEQ ID NO: 1030 - protein, 270 aa, Lactobacillus iners
MITYLKDNDDITLSFPKDQLINIFKNSNLNSTEKSDQLKPFFGRTNLEKGIIKLLSGGKQDLSNMFRDETLKNSNYKNLKFSDNRFDDERDGYAADLGDRIDLLILLKQIYDASILESMMSQARVSIDGHKYISSAKVCAYEKHKSDLKRLKSLIKKYLPSEYNNIFRKITEKDNYVAYSKSNITNNKREKALKYVKYVDFTKYLTKKLKTIKTQDAEDDQEIFEIKGELEKQSFLPKQRTLDNSIIPYQLHLMELKKYLIINLNIMTFC

SEQ ID NO: 1031 - protein, 255 aa, Lactobacillus iners
MITYLKDNDDITLSFPKDQLINIFKNSNLNSTEKSDQLKPFFGRTNLEKGIIKLLSGGKQDLSNMFRDETLKNSNYKNLKFSDNTFDDERDGYAADLGDRINLLILLKQIYDASILESMMSQARVSIDGHKYISSAKVCAYEKHKSDLKRLKSLIKKYLPSEYNNIFRKITEKDNYVAYSKSNITNNKREKALKYVEYVDFTKYLTKKLKTIKTQDAEDDKEIFEIKGELEKQSFLPKQRTLDNSIIPYQLHLME

SEQ ID NO: 1032 - protein, 343 aa, Lactobacillus iners
MLAKDDQEGITVKDKIISLLTFRLPYYIGPVNPAVHGKFAWVKRLANGKVTPWNYKEKIDIDASHEEFIKTKLSKCSFLIGCDVLPKNSLLYQKYMVLSELNTIKFNGVNISEKLKDDIYQNLFKNIQKVTKKRLQNYIKEHENIIGDVIVTGIDNAFKQGLVSYLKFKKIIGDKIDDDRYQKVLEKIIRDITLYDECAGKKIKKEYKDSDLFTEDELNKIVKLTFNDWGRLSAELLDQLEGEDTVSGETGKIIEFMQKHNYNLMQLMSKKFTFKYKIDEINKSYYQHDKFNYKSMIDSLYVSPATKRILWQSLKVVHEISKIMKHDPEKIFYRNGTFQRRSS

SEQ ID NO: 1033 - protein, 447 aa, Lactobacillus iners
MLYDHKLIGDKKYARLIRSKAFTDDELAGFIARQLVETRQATKETADLLKRLCPKSRIVYAKAQNASIFRQKFDIPKSRTINDLHHAQDAYLNIVVGNIFDTKFTQDPRNFIKNTKDSRNYNLEKIYDYNVERNNYVAWIAPDSKTNGTIANVKCNLSTKDFRVTRPSFYKKGALFNQNLSRKGSNLAPIKEHSPKSNPLKYGGYSGKNNSFFVVVAGKDNKGKDIVKLIPVNTLIYNKMLHCDYKAKQELLTSYVANNFAINNFRIVKDDIKMYSLVKIDGAYYYLVGGTDERIEVKNAMQLLLSKDSIKAVKILEKESKDQFANIKNYKDIDIKLGRTFNEVISKYTNSVFGKSMLISDKYRKDIFKSVDKSILEFNSLNTIAKADNLLKFVTSMRPAGSVDALKMVGLIERIRKSNVISNFNEFKLINQSVTGLFENEEDLLKL

SEQ ID NO: 1034 - protein, 667 aa, Lactobacillus iners
MQKHNYNLMQLMSKKFTFKSKIDEINKSYYQHDKFNYKSMIDSLYVSPATKRILWQSLKVVHEISKIMKHDPEKIFIEMARSKEDHPKRKLSRKADLKQVYKDSKKQIISIIGKDKYQDLSNELDNKDDRDLRWDNLYLYYTQLGRSMYSLKPIDISELMNKNLYDQDHIFPKSKKYDDSIENRVLVEKELNVKKSDIYPISDANIIPQKIKGQVESFWKMLYDHKLIGDKKYARLIRSKAFTDDELAGFIARQLVETRQATKETADLLKRLCPKSRIVYAKAQNASIFRQKFDIPKSRTINDLHHAQDAYLNIVVGNIFDTKFTQDPRNFIKNTKDSRNYNLEKIYDYNVERNNYVAWIAPDGETNGTIANVKCNLSTKDFRVTRPSFYKKGALFNQNLSRKGSNLAPIKEHSPKSNPLKYGGYSGKNNSFFVVVAGKDNKGKDIVKLIPVNTLIYNKMLHCDYKAKQELLTSYVANNFAINNFRIVKDDIKMYSLVKIDGAYYYLVGGTDERIEVKNAMQLLLSKDSIKAVKILEKESKDQFANIKNYKDIDIKLGRTFNEVVSKYTNSVFGKSMLISDKYRKDIFKSVEKSILEFNHLDTIGKADNLLKFVTLMRPSGSAHSLKMVGLIERIRKSNVISNFNEFKLINQSVTGLFENEEDLLKL

SEQ ID NO: 1035 - protein, 1395 aa, Lactobacillus jensenii; identical to SEQ ID NO: 113

SEQ ID NO: 1036 - protein, 1382 aa, Lactobacillus mucosae
MDIGTNSIGWTAIDDHFSLLRVKGKNAIGVRTFKEGETAADRRGFRTARRRLSRRRWRLQFLDEFFAPYLAEVDPNFLARLKQSDISAKDPAKNQEYMGKLLFPDQEAASDGNGYPTLIQMRKAMPAEKAADFPVFNIYQLRYALMNEKRKFDLREIYLAVHHIVKYRGNFLNNTSVDKFKADQIDFNKSFETLNDLFRQVQPIAPFQIDLTKVDELGKLLLDTKQKKLDRQKAVAKLLPLIEDGTDKEIVKAHQQTAREISKLILGYKAKVGLILQNNLDQTLDMSTENSDDQLMQIAEELDDYQMELINQLSLLYSQIMLNEIVPNGETVSASMLNRYYKHRCQLKELKDYGAAQDKKTREQLDHLYAEYIGQIPKDSKFDFTKDLKKLMDKSDLGQKIKDEIEAGDYLPKQRTSANGVIPHQMHQQELDQIIENQKEYYPWLAEPNPVEKNIKNAKYKLDQLVSFRVPYYVGPMITLADQQKTSKASFAWAVRKKAGKITPWNFYDMIDREKSANNFIKRMTNKDTYLLSEDVLPASSLLYQKFTVLNELNNIRVNGRKLQPALKQAIYTDLFQKRKTVNLKTLTNFLAIHEPTLTKPKIEGLSNGRSFNSSLGTYIDMSKILGDSLDDLNYRDDIEKIIEWSTVFEDSEIYGVKLQEIQWLTNEQREKLVRKRYQGWGRLSKKLLTGITDENGQRIIDLMWDTSKNFMQIVHQPVFEEQIAELNQQLLQDADKAPLEVVDDILADAYTSPQNKKAIRQVVKVVADVVKAVGNAPASISIEFARNEDRNKELKNSRRHSIEKLYHETAEKLVKQTNLLEELGNVKDLNDRYYLYFTQAGRDMYDGTPINIDEISTHYEIDHILPQSFLKDNSLDNRVLVKKSENAAKSDRVPAKLYGAKMRAFWKQLKESQLISNRKYLNLTTDPEQVDKYQMQGFVHRQLVETRQIIKLAANIFGSLYPDSAVIETRAELTKQLREKFSLYKVRDVNDYHHAVDAYLTAFAGHYLYQRYPKLRPMFVYGDYAKIYADDLKRLRSVNLFHDLEKDQYNSGTAVNPETKEKIVDVDWLSDYVSKIQHFKYMLISKAVYTQHGQLYGATILPVAQVDKISAPIGIKDDKPVDIYGAYTNEVAAYMAIVRVNGKKPKYKVVSVPVRMLQRLKMAEQKGHDQYMQTLHDVLLRNFTSLKKNRKTGLKEAVVKDFDVLVPCVRYNQLVIDGDTKFTLGSATYQHNAKQLVLCNHSLETLANNFEYVRKHPDEADERMIMLYDDILDQVNHYFTLYDKNKFREKLNAGRDKYLKLPTFSQFENNKKTAIGKSEAIINILRGLHANAAITNLKCLGVSTPFGQLQSPSGIELSENAKLVYQSPTGLFSREVLLKDL

SEQ ID NO: 1037 - protein, 1382 aa, Lactobacillus pentosus
MKKIVNYNLGLDIGTSSIGYAAIDDQGRPVRHQNKTVMGVRLFKEGKTAESTRIFRGTRRRLSHRHWRLGYLDRIFDNEIAKVDENFLPRLKASKRARSDEKRSFRGSLLFPETGDDAYYQKYPTIYHLRYALITQKKQFDIRLIYLALHHMIKYRGNFLDTTPVSAFNIHDIDLTDQFASLNDCYQLLDMDFEFQFDLNNIEQVQKLLLDETLSKTKRQAAVSKVLVMSTGNKAFDDQQNGIASEFIKALLGGPFDLSKILNLSVADVKSWKLHMTDKDVDDTLNSLVEELDENHKQIVNLLQMIYSQVMMLGLLNGQQSISASMIERYDDHAKHWAALKKLLPALGEQEQSTIIHAYTAYTGHSRTKQLSRAEFYTKVNSILKKHENIAEATGLIELIDRNEFMPKQRDAVNGVIPHQLHQRELQLIIQNQQKYYPFLAAKAYPDADETMIEQLLSFRVPYYAGPLVDRDFINESSDQEQAMQNTKFSWLKRREAGEITPWNFEQKVDVQETANRFIKRLTTKDTYLMTEDVLPKESLIYQRFEVLNELNAIRINDRRLTAENKQLAFQQLFMAGNTKNVSIKKFRNFVFDSLKFPEKVKITGFAGQHNFLAKLSTYHDFKKIFGERVDHTDLQPDFERIVEWCTIFEDRHIYREKLKEIQWLSQSEIDQLVLIRNHGWGRLSKRLLTGIRDSDGRTVMDQLWFGTDNFMRIISQSDFAAAIANENRTQLNQHGLEDVLDSAFMSPQNKKAIRQVLKVVDDIEQTLGCPPKKVMIEFTRSPDKKKQRTVTRLEKVQQAYKAVADQLAGQSIVSELDQYANTHSKLSDTYYLYFMQLGRDLYSGKPIDIDSPMLDDDHILPRAFMKDNSLDNRALTEKPINNTKAAKFPSKVFGQQKEVTDFWKLLRRCGLMSNIKEKHLYLDPDNVDKWTRRGFIHRQLVETSQVIKIVANILNDRYQQSQTEVLEVPARLGTELRECFGWYKVREVNDYHHVFDAYLAAFIGNYLYRRYPKLQPYFVYGNFAELNKAQLKNIKSFNFLYNITDNKRVVKDIETGQTLWDDQIRQQIQHIYEYKYMLTSHEAFTQHKELYGQTIYPRREFKPGTLKAIKQDQPQELYGGYKNLTAAYMCIVKIQARKRRAAEYRVVRVATESLSALQQAKRLGVQAYERCLRQELVRNNEILRTNADPNSAPREFEVLLDRVLCHQMIISDGQKYLLGSHAYKINCMQLVLSNNSMKILSTSIVKLKQMTNEPLVQVYREILDVVNKYFTLYDVNSFRENLNQFFDKFRTLPITNEYESSKSGKKLIHRGQLETLTLILRGLHANSDKVQYGDQSTLLGGFQTKDGIKLSKDSVIQYTSPAGLNVRTVKLRDLEQKEAQK

SEQ ID NO: 1038 - protein, 1361 aa, Lactobacillus pentosus
MNEPYGVGLDIGTNSVGWTVVDMNGRVRKVKGKTALGARLFKEGATAEDRRGFRTTRRRLKRVKWRLRLLREFFDQPISKIDPNFFARRKYSDISPRDPNYNGLAKTLFNDRTDKEFYDDYATIYHLRDKLMTSNRKFDIREIYLAIHHIVKYRGNFLRTGPASQYGSASLHLATSFQKLNDLFAQSEETLNLKLVTDEALLQQIQQILVRTDLSRSEQQRQIWPLMAVLTGASAAEKKRQKNVVVELSKALVGLKAKMNVVTLTEVDAAVVKDWTFTMEESQDKLPEIEEQLSEVGQQIMDEVIQLYASVNLAQLIPAGKRFSQHMVEKYKHHEKNLELLKAYIHSQSDSKRGREIRATYDRYIDGVDSKPVTQEMFYKDLMKYVEADATSNHLAAEIKDEIDSEQFMPKLRTKQNGSIPYQVQQYELDQIISHQKKYYPWLGEENPVAERRGKFPYKLDELVGFRVPYYVGPLITKEDQQATSGAGFAWMVRKADGPITPWNFDQKVDRIASATAFIQRMQTTDTYLIGEDVLPARSLIYQRFMVLNELNNMRVEDRKLAPQQKQRLYNQVFKQHQHVSVKNIQQNLMDAGEYRKTPQITGLADPKGFNSSLSTYHDFKKILLEAIADEHKRADIEKIILWSTTFEDSAIFKQKLEEVAWLTDAQRKQLSGLRYRGWGQLSHKLLTAFKDDKGRSIMDGLWETSDNFMQLRKQPAIETQIKEANQANLTDADIQDTINELYTSPQNKKAIREVMLVLDDIKNAMHGQTPSWIFVEAARGGGVAGRRTQSRSSQIVEAYKGTAKEIVSEKVQHELNEKIKAKADFNTRLVLYFLQNGRDLYTNEAINIDRLSEYDIDHILPQSLVKDDSLDNRVLTSARINREKNDTFASEKFGRKMGAQWRELHRNGLMTQRKLKHLLMRPDEISKHATDFINRQLVETRQVIKLVEELISSEYPAASIVAVKANLTHQFRQTFNFPKLREVNDYHHAFDASLTAFIGMYLLKQYPKLERFFVYGKFAKQPINLTRFNIIRKLAVAEKPIANIETGEILWDKTADIKYFEKLYNYKRLLVTHEVRENYGAMFKQTLFKASYNKSKTLVPKKNHMETSVYGGYSNQETAYLAIVRIPFKSGFKFIVVGIPTRMVAKIKHYQSLGATLNQATHKVIEPKFTKISRKTKQTVISDYEVVLPKVYLDQVVRDQVKGQMYRFSLGSDKEYHNVQELYLPLSIQQAFVGHYDESDDQRSNDLVKVYDAALKQLQRYFPLHLSRNFDQVASQAHQSFEGLKNNVQTSDKQLGKKEVLNSLFVGLHANATRSNLSVLGMSKDFGRIKSNGITLTDQAEIIYQSPTGLFERKVALKDL

SEQ ID NO: 1039 - protein, 1358 aa, Lactobacillus pentosus
MNEPYGVGLDIGTNSVGWTVVDMNGRVRKVKGKTALGARLFKEGATAEDRRGFRTTRRRLKRVKWRLRLLREFFDQPISKIDPNFFARRKYSDISPRDPNYNGLAKTLFNDRTDQEFYHDYPTIYHLRDKLMTSDRKFDIREIYLAIHHIVKYRGNFLRTGPASQYGSASLHLATSFQKLNDLFAQSEESLNFKLVTDEAQLQQIQQILVRTDLSRSEQQRQIWPLMVVLMGATAAEKKRQKDFAKELANALVGLKAKLNVVTLTNVDTTVVKDWTFTLEESQDKLPEIEEQLSEVGQQIMDEVIQLYASVNLAQLIPAGKRFSQHMVEKYNHHEKNLELLKAYIHSQSDSKRGREIRATYDRYIDGVKSKPVTQEMFYKDLMKYVEADATSNHLAAEIKDEIDSEQFMPKLRTKQNGSIPYQVQQYELDQIISHQKKYYPWLGEENPVAERRGKFPYKLDELVGFRVPYYVGPLITKEDQQATSGAGFAWMVRKADGPITPWNFDQKVDRIASATAFIQRMQTTDTYLIGEDVLPARSLIYQRFMVLNELNNMRVEDQKLAPRQKQRLYNQVFKQHQHVSVKNIQQNLMDAGEYRETPKITGLADPKGFNSSLSTYHDFKKILPEAIADEHKRADIEKIILWSTTFEDSAIFKQKLEEVAWLTDAQRKQLSGLRYRGWGQLSHKLLTAFKDDNGRSVMDGLWETSDNFMQLRKQPAIETQIKEANQANLTDADIQDTINELYTSPQNKKAIREVMLVLDDIKNAMHGQTPSWIFIEAARGGGVAGRRTQSRSKQIVEAYKSTAKEIVSEKVQHELNEKIKAKADFNTRLVLYFLQNGRDLYTNEAINIDRLSEYDIDHILPQSLVKDDSLDNRVLTSARINREKNDTFASEKFGRKMGAQWRELHRNGLMTQRKLKHLLMRPDEISKHATDFINRQLVETRQVIKLVEELISSEYPSASIVAVKANLTHQFRQTFNFPKLREVNDYHHAFDASLTAFIGMYLLKQYPKLERFFVYGKFAKQPINLTRFNVIRKLAVAEEPIANIETGEILWDKTADIKCFEKLYNYKRLLVTHEVRENYGAMFDQTIFKATDSRKRLIQKKKGFATETYGGYTGRTLAYLAIVKVVTNKDTQYQVVGIPTTMVTQIQQLEASGLTSKQAVTKAIGAMINENNKKLQSYEVLLPKVRFEQVVRDEVKGHIHRFALGTDTYYHNIQELYLPLTIQRAFLGKRNDTDAQTEQNLLTVFETTLAQVNRYFPLYEMNKFKQILNSAQEKFAALPTKNKTVKNKLVTGKDGVLNNLFIGLHANASLGDLKILGMKIGFGKLQVPGGLKLTDQAEIIYQSPTGLFERKVALKDL

SEQ ID NO: 1040 - protein, 1358 aa, Lactobacillus plantarum
MKEPYGVGLDIGTNSVGWTVVDASGHVRKIKGQTGIGVRLFKEGAAAADRRGFRTTRRRLKRVKWRLRLLREFFDQPISKVDINFFARRKYSDVSPRDPNYNGLEKTLFNDRSDQDFYHDYPTIYHLREALMTQHRKFDVREIYLAIHHIVKYRGNFLRNDAATAYRSGTLDLQQHFETLNHLFSQADLELNLNLTTDVALLDSIKQTLVRTDISRSDRQKLIMPLLAVLTGATTAEKKRQKAVVTEFAKALVGNKTKIDVLTLTDIDATEAKDWAFSLEENQDKLPGIEDRFSEVGQQIIDEVIRLYASVNLAQLIPEGKRFSQSMVEKYKRHGEDLKLLKAYIRSQSDAKRGRAIRATYDQYIDGVKSKQVTQEAFQKALGKFVDADVDLNSWAAQIKQAIDSEQFMPKLRTKQNGAIPYQVQQNELDQIISNQKEYYPWLGEENPVIKRRGKFPYKLDELFGFRVPYYVGPLITKEMQAATANAGFAWMVRKADGPITPWNFDDKVDRVASATAFIQRMQTTDTYLIGEEVLPARSLIYQRFMVLNELNNIRVDDGQLTPRQKQRLYNQVFKKHKRVTAKNIQDNLVAAREFPTAPRITGLADPKVFNSSLSTYHDLKQVLPEAMSDVRKQADIEKIILWSTIFEDSTIFKQKLTEISWLTAAQLKQLGQLRYRGWGQLLRKLLTGLKDDNNRSIMDGLWETNANFMQLRSQPAIENQIKSANQANLTTADLQDTINELYTSPQNKKAIREVMVVLADIKDAMHGQTPNWIFVEAARGGGVAGRRTQSRSKQIVAAYQGTAQAIVRDQVQRELKEKIKNKANFNTRLVLYFLQNGRDLYTGDAINIDRLSEYDIDHILPQSLVKDDSLDNRVLTNARINREKNDTFASEKFGKKMGAKWKEMHRMGLMTKRKLDHLLMRPDEISKYATGFINRQLVETRQVIKLVEELINAEYPSTAIVSVKANLTHQFRQTFDFPKIREVNDYHHAFDAALTAFIGTYLLKRYPKLERFFVYGKFAKQPVNLTRFNVIRKLAKTDTPITDIDTGEVLWDKLTDIKYFETLYDYKRLLVTREVSENYGAMFDQTLLKASDNGKRLIRKKQSFDTAIYGGYTGKTLAYMAIVKVSTKKDVQYQVVGVPTTMVTQIEQLEQQGMTNKQAVTKVIEPLIAANNKKMLTYEVLLPKVRFEQVVRDRIKGQTHRFALGTDTYYHNIQELYLPLTLQRAFLGKQNESEVQLNQNLLTVFDATLAQVNRYFPLYEMNKFKKILNSARDQIELLEAKNQFVKNKLVLGKQGILTNMFIGLHANASYGDLKVLGVKIDFGKLQVPGGIKLTGDAEIIYQSPTGLFERKIALKDL

SEQ ID NO: 1041 - protein, 1361 aa, Lactobacillus rhamnosus
MTKLNQPYGIGLDIGSNSIGFAVVDANSHLLRLKGETAIGARLFREGQSAAERRESRTTRRRLSRTRWRLSFLRDFFAPHITKIDPDFFLRQKYSEISPKDKDRFKYEKRLFNDRTDAEFYEDYPSMYHLRLHLMTHTHKADPREIFLAIHHILKSRGHFLTPGAAKDFNTDKVDLEDIFPALTEAYAQVYPDLELTFDLAKADDFKAKLLDEQATPSDTQKALVNLLLSSDGEKEIVKKRKQVLTEFAKAITGLKTKFNLALGTEVDEADASNWQFSMGQLDDKWSNIETSMTDQGTEIFEQIQEHYRARLLNGIVPAGMSLSQAKVADYGQHKEDLELFKTYLKKLNDHELAKTIRGLYDRYINGDDAKPFLREDFVKALTKEVTAHPNEVSEQLLNRMGQANFMLKQRTKANGAIPVQLQQRELDQIIANQSKYYDWLAKPNPVEKHRASKPYQLDELLTFRIPYYVGPLITPKEQAESRENVFAWMIRKDPSGNITPYNFDEKVDCPASANMFIQRMKNTDTYLIGEDVLPKRSLLYQKYEVLNELNNVSIDGRRLGADQKQRLIREVFERHSSVTIKQVAENLVAHGDFAKRPEIRGLADEKRFLSSLSTYHQLKKILHEAIDDPTKEHDIENIITWSTVFEDAAIFKTELAKISWLDSDTIKALSNIRYRGWGQFSRKLLDGLKLGNGHTVIQELMLSNHNLMQILTDETLKTTMAELNQDKLKADDIEDVINDAYTSPSNKKALRQVLRVVEDIKHAANGQDPSWLYIETADGPGTAGKRTQSRQKQIQTVYANAAQELIDSAVRGELEDKIADKASFTDRLVLYFMQGGRDIYTGAPLNIDQLSHYDIDHILPQSLIKDDSLDNRVLVNATINREKNNVFASTLFASKMAATWRKWHEAGLISGRKLRNLMLRPDEIDKFAHGFVARQLVETRQIIKLTEQIAAAQYPNTKIIAVKAGLSHQLREELDFPKNRDVNHYHHAFDAFLAARIGTYLLKRYPKLAPFFTYGEFAKVDVKKFREFNFIGALTHAKKNIVAKDTGEIVWDKERDIQELDRIYNFKRMLITHEVYFETADLFKQTIYAAKDSKERGGSKQLIPKKQGYPTQVYGGYTRENTAYLAVVKTVEKKADVYRVVRIATSQVAALKEARAQSTVKERELLKKFLTTKFTKIGKNGKKAITPFDIVIPRVPREQLFHNKRYGFFMVNSDTLMHNYQELWMSRSDQQILSKLVKSAKTVENGQVGRLFENIVEQINKYFPLYDINQFRKKLDQSKDIFSKLPLEGNGTTSGKRETIQNILTGAGTGAKNGDLKNLGIKTPFGFLQVPSGIVLDDDTTLIYQSPTGMLNRIVRLSEL

SEQ ID NO: 1042 - protein, 1361 aa, Lactobacillus rhamnosus
MTKLNQPYGIGLDIGSNSIGFAVVDANSHLLRLKGETAIGARLFREGQSAAERRESRTTRRRLSRTRWRLSFLRDFFAPHITKIDPDFFLRQKYSEISPKDKDRFKYEKRLFNDRTDAEFYEDYPSMYHLRLHLMTHTHKADPREIFLAIHHILKSRGHFLTPGAAKDFNTDKVDLEDIFPALTEAYAQVYPDLELTFDLAKADDFKAKLLDEQATPSDTQKALVNLLLSSDGEKEIVKKRKQVLTEFAKAITGLKTKFNLALGTEVDEADASNWQFSMGQLDDKWSNIETSMTDQGTEIFEQIQELYRARLLNGIVPAGMSLSQAKVADYGQHKEDLELFKTYLKKLNDHELAKTIRGLYDRYINGDDAKPFLREDFVKALTKEVTAHPNEVSEQLLNRMGQANFMLKQRTKANGAIPVQLQQRELDQIIANQSKYYDWLAKPNPVEKHRASKPYQLDELLTFRIPYYVGPLITPKEQAESRENVFAWMIRKDPSGNITPYNFDEKVDCPASANMFIQRMKNTDTYLIGEDVLPKRSLLYQKYEVLNELNNVSIDGRRLGADQKQRLIREVFERHSSVTIKQVAENLVAHGDFAKRPEIRGLADEKRFLSSLSTYHQLKKILHEAIDDPTKEHDIENIITWSTVFEDAAIFKTELAKISWLDSDTIKALSNIRYRGWGQFSRKLLDGLKLGNGHTVIQELMLSNHNLMQILTDETLKTTMAELNQDKLKADDIEDVINDAYTSPSNKKALRQVLRVVEDIKHAANGQDPSWLYIETADGPGTAGKRTQSRQKQIQTVYANAAQELIDSAVRGELEDKIADKASFTDRLVLYFMQGGRDIYTGAPLNIDQLSHYDIDHILPQSLIKDDSLDNRVLVNATINREKNNVFASTLFASKMAATWRKWHEAGLISGRKLRNLMLRPDEIDKFAHGFVARQLVETRQIIKLTEQIAAAQYPNTKIIAVKAGLSHQLREELDFPKNRDVNHYHHAFDAFLAARIGTYLLKRYPKLAPFFTYGEFAKVDVKKFREFNFIGALTHAKKNIVAKDTGEIVWDKERDIQELDRIYNFKRMLITHEVYFETADLFKQTIYAAKDSKERGGSKQLIPKKQGYPTQVYGGYTRENTAYLAVVKTVEKKADVYRVVRIATSQVAALKEARAQSTVKERELLKKFLTTKFTKIGKNGKKAITPFDIVIPRVPREQLFHNKRYGFFMVNSDTLMHNYQELWMSRSDQQILSKLVKSAKTVENGQVGRLFENIVEQINKYFPLYDINQFRKKLDQSKDIFSKLPLEGNGTTSGKRETIQNILTGAGTGAKNGDLKNLGIKTPFGFLQVPSGIVLDDDTTLIYQSPTGMLNRIVRLSEL

SEQ ID NO: 1043 - protein, 1352 aa, Lactobacillus ruminis
MNDNFDLMRVKGKKGIGVRLYNEGQSAAERRMHRTARRRYGRRKWRLRLLEDFFDEHMAEVDDTFFARLKDSNISPKDDKKYRKSLLFPKSKGVTYQDDGEFYKKYPTMYHLRYALMTEHRKFDLREIYLAFHHMVKYRGNFLYDTSVDSFEAKNLDIKGKFDEINDLLSSYTDFYVDNSNAALVESILLEKNTTRKDKSKKIAKLLHVEDKEKGKNKKAKDLATQISNAVLGLKCNFHLIFELQQKYSFDLCSEKTEENIAKLSEVLDENQKMLLMILKEVQDQVMLNAFVPSGMSLSEAMMQKYDDYGEQLKIYHELEHSVSDDSAAKLRGAYRDYNDNIIKRIDGDNKKDTFYKRVKNILTKISKEYVDQDVLESCGKLKKLIDENKLFIRQRTAANGVLPHQLHQIEMRKIIDNQKEYYPWLAEPNPNEKRRVYSKYKVEELIAFRIPYYVGPLVDPNNADKNKEARFSWMVRKKDGEITPWNFYDKVDWAESANNFIERMKSKDTYLLGEDVVPKESMLYQKYEVLNELNNLRINDSGLSDSFEDVKLKQAIYNDLFKKQKIVKITDLQNYLVQNHKYLVKPKISGLADENRFLSSLSTYSDLKTIFGDKVDDRTYFNDFEKMVEYSTVFEDGHDYNQKLDEYTWLTKEEKYKIGKKRYRGWGKLSKKLLTGLRDKNNHTIMDNLWETNRNFMQIQTADEFSKQIAEENERHLKGSVSDAINDMYTSPANKKAIRQVLRVVDDIQKAMGYAPSSISLEFAREDGPSVRTVSRANRMKSIYEKYASEVSEEVMKDLDGVIKDKKGLNDRLYLYFEQQGKDMYSGHPLDFDKVISGQEYDIDHILPQAVIKDDSLDNRVLTTKALNNDVKSKGVPCRMFNGMHSFWKNLYDKGFISRRKFNNLTTNPENIDKYKMKGFVNRQLVETRQIIKLVANVLNDKYQNDDVDIIEVRAELTHDVRKHFKFYKNRNVNDYHHAFDAYLTSFIGHYLFKKYPNLRPLFDYNDFMKVSDNVFKQLRGNNFLGEFLNKTGDIISTDGNFVLNKEEMINKLNKAYAFKKILVTKEVGQRTGAMFNETRYPAPNSRKAALKYRRMPKPDSLISVKDYKNTDIYGGYSGKNDAYMVIVDMGKQYMVVGVPVRYTEKLDKLRIKHSELYRDELRKVLSRDKTLLDSKGNVKRFDIVLDRVLYGQLIEDGNELFTLGSSKYKRNFRQLFLDKQCIEILDSSATPQPTDEELIWVYDQILDKVDKYFELYDINRQRETLRKGRAAFCSLPNISMKKDDVTKKKILNEILVALHANESESNCEKIGKKVFGRLQVPGGIKLSKEAKLIYQSPTGLFERVVYLKDL

SEQ ID NO: 1044 - protein, 1339 aa, Lactobacillus salivarius
MERYHIGLDIGTSSIGWAVIGDDFKIKKKKGKNLIGTRLFNEGATAAERRGFRTQRRRLNRRKWRLKLLEEIFDPYMAEVDEYFFARLKSSNLSPKDSNKKYLGSLLFPDKSDSNFYDKYPTIYHLRRDLMEKDEKFDLREIYLAIHHIVKYRGNFLEKVPAKNYKNSGASIGFLLEEVNSLYKDIIGDESIAILNSEKFEDVEKIILDEETRNLDKQKSVGKLLVEDKKKKNIVTAFSKAIFGYKFNIEDLLLIENDEKNKLTFNDENIDDIFNELSHSLDDKQMDLLTKTREIYFKFKLNMIVPTGYTLSESMIEKYEMHKAHLKMYKEFINTLNTKDRKILKNAYSDYINTEKAKAANAQENFYKTVKKIIKDNNSDTAKKIIVLIDEGNFMPKQRTGENGVIPHQLHQIELDRIIENQAKYYPWLAEANPVEKNRKFAKYKLDELVTFRVPYYVGPLIDKTESNKNEKETKFAWMVRKAKGTITPWNFENLVDRTESANRFIKRMTSKDTYIIGEDVLPASSLLYEKFKVLNELNNIKVNEKKLDIEQKQDIYLNLFTTAKNVTKKSLATYLNCSADSISGLSDGEKFNSSLSSYIDLKAILGNIVDDCNKNEDLEKIIEYSTVFEDGNIYKEKLSEISWLTDEQIEKLSNIHFKGWGRLSKKLLTQITNENGERIIDALWNTSNNFMQIINDESIQAKLAEINGKYAGKSDLEDILSEAYTSPQNKKAIRQVMKVVEDIEKAMQCEPTSISIEFTRKKQKSRLTNTRYKKISDVYEKIADEVISEYELRKLQSELDSNANNMRDRYYLYFMQLGRDMYTGEKINIDELHQRYDIDHILPQSFIKDDSINNRVLTRKDVNNKEKSDKTAADLYAVEMSDFWRKLRKQGLITEQKYKNLLTKSDSIDKYAKKGFIKRQLVETSQVVKLVANILQDKYSDTKIIEVRAKLNSNLREEYKLIKNRAVNDYHHAIDGYLTTFIGQYLYKTYPKLRSYFVYNDFKKLDSNYLKHMKKFNFLWQLQDDKTIDIYDNVNNKFVLNVPEMKKYIQKIYNYKYMLVSKEVTTKNGAFYDQTKYNAKTVNLIPIKKNKPTNIYGGYKGKVSSYMMLVKIRKKKEVIYKFVGVPRLWTDELDRLKDTTERKILLNEIAKNSLSKTEQDFEVILDKVYYGQLIIDGNQKYTLGSSEYKYNAMQLHLSKHALEVLAKENVKDAEITDKDLVSVYEEILSVVNKYFELYDINKFRQKLNEGLEIFRKLPVYNVYESNKIKQVGKFEVLNRILMGLHANAMITDLKVLGIKTKLGQMQVNGGIKLSPDAKLIYQSPTGIFSRAVRVKDLG

SEQ ID NO: 1045 - protein, 629 aa, Lactobacillus salivarius
MERYHIGLDIGTSSIGWAVTGDDFKIKRKKGKNLIGTRLFKEGNTAAERRGFRTQRRRLNRRKWRLKLLEEIFDPYMAEVDEYFFARLKDSNLSPKDSNKKYLGSLLFPDISDSNFYDKYPTIYHLRRDLMEKDEKFDLREIYLAIHHIVKYRGNFLENVPAKNYKNSGASIGFLLEEVNNLYKDIVGDENVTILNSEKFEDVEKIILDDGIRNLDKQKGVGKLLVEDKKNKNLVTAFSKAIFGYKFNIEDLLLVEGDEKSKLTFNDENIDDIFNELSHSLDDRRMDLLTKTREIYFKFKLNMIVPTGYTLSESMIEKYEIHKAHLKMYKEFINTLNSKDRKILKNAYTDYINNEKAKAANAQENFYKTVKKTIKDNDSDIVKKIIDLIDEGNFMPKQRTGENGVIPHQLHQIELDRIIENQAKYYPWLAEENPVEKNRKFAKYKLDELVTFRVPYYVGPLVDKTESNKNEKETKFAWMVRKSKGTITPWNFENLVDRTESANRFIKRMTSKDTYIIGEDVLPASSLLYEKFKVLNELNNIKVNEKKLDIEQKQNIYLKLFTTTKNVTKKNLATFLNCSIESISGLSDDKKFNSSLSSYIDLKVILGDIVDDYSKNEDLEKIIEYSTIF

SEQ ID NO: 1046 - protein, 897 aa, Lactobacillus salivarius
  VARIANT 822: note = misc_feature - Xaa can be any naturally occurring amino acid
MLIESDEKNKLTFNDENIDDIFNELSHSLDDNQMDLLTKTREIYFKFKLNMIVPTGYTLSESMIEKYEMHKAHLKMYKEFINTLNAKDRKILKNAYSDYINNEKAKAANAQENFYKTIKKTIKDNNSDTAKKIIGLIDEGNFMPKQRTGENGVIPHQLHQIELDRIIENQAKYYPWLAEENPVEKNRKFAKYKLDELVTFRVPYYVGPLVDKTESNKNEKETKFAWMVRKAKGTITPWNFENLVDRTESANRFIKRMTSKDTYIIGEDVLPASSLLYEKFKVLNELNNIKVNKKKLDVEQKQHVYLDLFTTRKNVTKDNLATSLNCDVESITGLSDNEKFNSSLSSYIDLKAILGNAVDDCNKNKDLEKIIEYSTIFEDGNIYKEKLSEISWLTDEQIEKLSNIHFKGWGRLSKKLLTQITNENGERIIDALWNTSNNFIQIISDESIQAKLAEINGEYADKSNLEDILDEAYTSPQNKKAIRQVMKVVEDIEKAMKCKPTSIAIEFTRRKGKSKLTNTRYKKISETYEKITDELISEYELGKLQSKLDSKANNMRDIYYLYFMQLGRDMYTGEKINIDELHQYYDIDHIFPRSFIKDNSLNNRVLTRKEINNNEKADRTAADLYAVKMGDFWRKLRKQGLITEKKYKNLLTRTDSIDKYTKQSFIKRQLVETSQVVKMAANILQDKYSNTKIIEVRARLNSDLRKEYELIKNREVNDYHHAIDGYLTIFIGQYLYKTYPKLRSYFVYDDFKKLDSNYLKHMDKFNFIWKLEDKKAEDVYDNVNNEFILNVPKMKDYIQKIYNYKYMLISKEVTTESGAFYXZTKYNAKTINLIPIKKDKPTNIYGGYKGKVSSYMMLVKIQKKKEVIYKFVGVPRLWTDELDRLIDTDEKKALLKK

SEQ ID NO: 1047 - protein, 1419 aa, Lactobacillus sp.
MAKPQNYTIGLDIGTNSVGWTVTDDQNNILRIKSKKAIGARLFEEGKVAAERRSFRTTRRRLSRRKWRIKLLEELFDEEISKVDPNFFARSHESWISPKDKRERYSAIVFPTPEEDKKFHNEYPTIYHLRDRLMKDDQKHDIREIYVAIHHIMKYRGNFLHDESIETYRSGMSSLGGGDERTILNTKILDDLNDAFADNLATQGISVNSASADQINEIVTSGHLNVDSQKAIAKLLLPTTLSSDDKKQDKKIKKLATDAAKNVASAWLGYKANFAAILNIQEVDKDKKKIYSFALQGADEEDKVETLESVLSQDQIEIVDRIIRIRHAIVLGEIIPVGMTLSEAMIEKYDQHAKDLKNLKTVIRNLKDRKNAVKLQAIYDLYVNNRHADTAKAMKLAGVKKRTELLEPEEFNKSIEKLLDDSPVSAEIKKRIAEKDFLPLQRSNSNGVIPNQLHQIELDEIIKKQSKYYPFLGETNEHASADVARKAPTKLDQLLTFRVPYYVGPLITKEEQEEQDGHSFAWMIRKNPKDHEKITPWNFDEKVDRMASATQFIKRMTTKDTYLLGEDVLPSSSLKYQLFTVLNELNNLRINHKKLTREEKEQVIEDLFKKYKTVKADKFKNYWQKGHAGLDVKIQGMADPEKFNSTMSTYIDLQKIFGDQLDDAQRQNDFEKIIEYSTIFEDRKILGEKLRADFVWLSEDQIKRLCRLRLQGWGRLSLKLLTRLTDADGQNVLERLLNSNDNFMQIVKDPVIKAKIEQKNQKLLRADWSENATESILDEAYTSPQNKKAIRQVMRVVHDIVKACDGNLPAKFAIEFARSQDDDPKRTVARADRLQKIYAQISDEVVSQGVKDQLSGMKSLKDRYYLYFMQGGRDAYTGKPLNIDRLSDYDIDHIMPQSFIKDDSLDNRVLVTRAVNNQKSDNVPVLLYGNHLVADLGITIREMWDRWQKSGMISKRKLANLLTDPATLSEYRAEGFINRQLVETSQVIKLTATILQSEFPDSKIIEVPAKYNSILRKQFDLYKSREVNDYHHAIDAYLSTIVGNYLYQVYPNLRRLFVYGEFKKFSHGEEESSHQAVRRVKSMNFLDDLLRGKHGDDIYCRVTGEVIFSRKDIISKLKQAYSFKQMLVTQEVFTKKSALFDQTVYPSPARDSKTRSGLIPRKQGMDTEIYGGYSGNKDAYFVLAQVVKSKGHTLQVVGVPIRALRALANCSNYSEQLLKIVKAQVLFNKKTGKAKKGISDVRILLDKIPYRQPVLDGSAFYMLGSSTYKYNLKQISLSQQSMKYILDYIDDPNFNKHEMTKIDQQNEKECLLSVYDEILDKMDKYLSLYDINGFRKKLHVGRDKFIKLEVEKQAEAIKNVLRGFHANSDMTKLSDLGLSTSLGFMQASDGIKLSDNAVFIYQSPTGLFERRVKVSDLLK

SEQ ID NO: 1048 - protein, 1289 aa, Lactobacillus versmoldensis
MRRRYRRRRNRLNWLDELFADELAKIDPSFLLRMKNSWVSKKESTRKRDPYNLFIDEKYNDVDYFNQYPTIFHLRKELITEDKKVDIRLIYLAIHNIIKYRGNFTLENQNFDISQLSSNFSQQISDFFALFSDFGVIMPEDFDPDKISDILLNPNLSPSGKVSEAIATISPKTNVKAKIKIILLLLVGNNGDLKKLFDLETTEKIAVKLSSRHIDSELPIILSELNEQQENIITIANSIFGSIILKDFLGDETSISAAKVISFEDHKQDLQKLKTMWRETSNKEAVKAGKKAYEDYIGHEDSETFYKKIKKFLEKAQPVDLANKALAEIELENYLPKQRNRNNTVIPYQLNENELIAILDHQEKYYPFLKENRDKILSLLTFRIPYYVGPLQDSNNNRFSWMTRKASGAIRPWNFSEKVNVEQSSNDFIKRMRSTDTYLIGEPVLPKKSLIYQCYEVLSELNNTRVKDGSSNPKRLDVTIKQRIYNEIFKNQKSVSVKVLQNWLIKESYFKSPEISGLADKKKYLSSLSTYIDFKKIFGQRFVDDPVNSPQLEELAEWLTLFEDKKILLIKLQNSKYSYDQATINKLSTMRYQGTGKLSKKLLVDLKTTKKSIGKSGAESLSILDLMWSTKDNFMQIIHDADYTFEQQIKEFNYDTEDELTPLEKVANLHGSPALKRGLNQSIKVVADIVKFMGHDPEKIFIEFTRSDDFSKLTISRYRRIKKQYLEIAKAIKKIPAEFKDIKEYQTQLEENKGKLASERLMLYFLQCGHSLYSNKPIDLNMINSSKYHVDHILPQSYIKDDSLENKALVLASENENKIDNMLISHDIIATNLPRWQALKDQNLMGSKKFADLTRTTVTENQKKGFIQRQLVQTSQIVKNITLILNDLYKNTSCIETRATLSSEFRKAFSNFDETTYHYQFPEFVKNRDVNDFHHAQDAFLACVIGEYQLKKYPKDNLRLVYDQYSKFLDSLKKDTRKKNGRMPRYTQNGFIIGSMFNGKTYVDDNGEIIWDQKIKESIRKTFNYHQFNVVRQTIEQHGKLFNDTIQPHSDRYKLIPLKTNRDPAIYGGYNNDNNAYSVVLDVDGKKKINGIPIRIANQLKSDELDLSSWLENNIKHKKPMTILIDKVPKYQRIINEETGDLLITSANEVINNVQLFLPSMYTALISLLDSTKTEMYSKLLSNYEANILIDIYDYLLTKLKNNYPLYRKEWAKLAEHRDDFIESDLVTQASTLQQLIKFMHADPSNVNLKFGNFKGNRFGRKNGNIKLSKTDFIYESPTGLFKSIKHID

SEQ ID NO: 1049 - protein, 1372 aa, Legionella pneumophila
MESSQILSPIGIDLGGKFTGVCLSHLEAFAELPNHANTKYSVILIDHNNFQLSQAQRRATRHRVRNKKRNQFVKRVALQLFQHILSRDLNAKEETALCHYLNNRGYTYVDTDLDEYIKDETTINLLKELLPSESEHNFIDWFLQKMQSSEFRKILVSKVEEKKDDKELKNAVKNIKNFITGFEKNSVEGHRHRKVYFENIKSDITKDNQLDSIKKKIPSVCLSNLLGHLSNLQWKNLHRYLAKNPKQFDEQTFGNEFLRMLKNFRHLKGSQESLAVRNLIQQLEQSQDYISILEKTPPEITIPPYEARTNTGMEKDQSLLLNPEKLNNLYPNWRNLIPGIIDAHPFLEKDLEHTKLRDRKRIISPSKQDEKRDSYILQRYLDLNKKIDKFKIKKQLSFLGQGKQLPANLIETQKEMETHFNSSLVSVLIQIASAYNKEREDAAQGIWFDNAFSLCELSNINPPRKQKILPLLVGAILSEDFINNKDKWAKFKNFWNTHKIGRTSLKSKCKEIEEARKNSGNAFKIDYEEALNHPEHSNNKALIKIIQTIPDIIQAIQSHLGHNDSQALIYHNPFSLSQLYTILETKRDGFHKNCVAVTCENYWRSQKTEIDPEISYASRLPADSVRPFDGVLARMMQRLAYEIAMAKWEQIKHIPDNSSLLIPIYLEQNRFEFEESFKKIKGGSSDKTLEQAIEKQNIQWEEKFQRIINASMNICPYKGASIGGQGEIDHIYPRSLSKKHFGVIFNSEANLIYCSSQGNREKKEEHYLLEHLSPLYLKHQFGTDNVSDIKNFISQNVANIKKYISFHLLTPEQQKAARHALFLDYDDEAFKTITKFLMSQQKARVNGTQKFLGKQIMEFLSTLADSKQLQLEFSIKQITAEEVHDHRELLSKQEPKLVKSRQQSFPSHAIDATLTMSIGLKEFPQFSQELDNSWFINHLMPDEVHLNPVRSKEKYNKPNISSTPLFKDSLYAERFIPVWVKGETFAIGFSEKDLFEIKPSNKEKLFTLLKTYSTKNPGESLQELQAKSKAKWLYFPINKTLALEFLHHYFHKEIVTPDDTTVCHFINSLRYYTKKESITVKILKEPMPVLSVKFESSKKNVLGSFKHTIALPATKDWERLFNHPNFLALKANPAPNPKEFNEFIRKYFLSDNNPNSDIPNNGHNIKPQKHKAVRKVFSLPVIPGNAGTMMRIRRKDNKGQPLYQLQTIDDTPSMGIQINEDRLVKQEVLMDAYKTRNLSTIDGINNSEGQAYATFDNWLTLPVSTFKPEIIKLEMKPHSKTRRYIRITQSLADFIKTIDEALMIKPSDSIDDPLNMPNEIVCKNKLFGNELKPRDGKMKIVSTGKIVTYEFESDSTPQWIQTLYVTQLKKQP

SEQ ID NO: 1050 - protein, 907 aa, Leptospira inadai
MAKSIEEIRSIQNEFVVEYSILLKKIKKGEIDKKNDVYKVYQNTIKSSERLEQVLKERLGFQNVSKSYFNNPYSIAQLYNLISVDRSGFSKVCRSCQEENHWRSTLIDTDRGPQAQASKQVSDTGRPFDGQLAMLLDRIAFEIVKLKRIEIERLLSNKNSSKIEVVEIPLLIEENSFNFRYELAELKKLSKKKKDQLKKSVEEFDTKLNSKQERIKAASRELCPYTGKKISKGEIDHILPRSWTQKQFGTALNAEANLIYASREGNQSKGNREYGLNDLDEKYLNIIFGTKEVDSIQRNISDTIDRLDIERGTTRIVFDRLAPNERDCLRHALFIKSLRPKVFELLSGQLKARVNGTQLYLAKRIRSLLLKNQDFITKSLIIKVPSFSFYEPRTVDLPYMRKELAEKFPNLGKQNPQPTGSHIIDAAMVMAYAVETDSGNLSFGSKDKSEGFDSESLSRFLPSNIQFLSIKSKDKTDSKYPYKKPLFKDGVFGERFLPILIAEKGLRVGYTLENSLEVNSENPEEFFNVLKPYLLFKRKPIESNYQTLVAFAQKDKRGYIVLPVNKPKALESISQRKSDPHTSILKNILYTVSRESIPSLIFDKNTLIPEIKSNKVNWGDKLEKKFRIKIEIKLYGKKIADGFIRYPGKTEWEKLLLTEPLKGLVKNKTLTPKWFDSLENLAGLDDHFKDTSNPEAKHKRKSNHYALPVPKGPSGGFRIRRNSFDGYKVYQLYSVDGNSFHAFKIENGWTGKTLLLDIYQNSGNLHSLDYDYENTDISQTALFSKFYKIEFSKEETQKINSKGIKSLYVAPGSSSRQYIRVIFDKQTFSKFIKFQSKFWEFDLITPLPKDKAKDLIESILKIFPEDLRPKKPRNDIHIQNISHDSVQVEYIADGKTQGFGQYFINQN

SEQ ID NO: 1051 - protein, 418 aa, Leptospira inadai
MILKSPIAIDLGAKNTGIVYTTYQPNALPTEIHGATIISDNLKLSQVDRRAKRHQRRNYTRMKLARRLVYLIIRYHYRIPEQDLTPEVKTSLQSLLTRRGYTFQSIETEGNELGQAPWGEIEDYFPNVQDYEKSLPIQTVLYHFFSSENLELNKLVPSKEPETKEDKNILKYIREQKEAFESEQNNGARHRLKYFEEIKEDFPRKIKLMECLQKNKIEEKKFLNLIQNISNLQIKPLRAYFNDKDMKEKEIWEPRRLHTYIARWIRSWHIDPKNSSKRLIRQKLLSQLENGKLKIIRDTSIYSPSKDIISFLEEIDPKDTIPPYEDQNNRHPPRCQNLWLDGKILDRYFPGWEQSLWKLIRNEKNNPFEQLITKDFRTDDTISEGKSLSEQIQIYERSHSNIKLDVRAVILQRFLDRS

SEQ ID NO: 1052 - protein, 125 aa, Leptospira inadai
MSAYDRSANLDPWSLRLQGKAKKEIKTTESLSKTDLQKASDAYEKIKEILSESDTDQFIKLANRYYLEVADIKKGMWLPTAPERKHKEIPKSIAHEENQDISLFHKCNTKTGSKKRISQVSLEMF

SEQ ID NO: 1053 - protein, 1355 aa, Leuconostoc gelidum
MTYSIGLDIGTGSVGWAVIGDDYRLKRAKGKNLIGVRLFDSATTAAERRGYRTTRRRLSRRHWRLRLLNDIFASDLAEQDENFLPRLKYSWVNPDDEQNPQLNSDVANGALFGSSETDKAFHKNYPTIYHLRHELMTDTAKHDLREVYLAIHHIVKYRGNFLNTADKINAENSFNVDLFIAALDEYNEFLETPITSIKDAQLFSDKLTDINARNKSVRVENAMSETYDDKSKIFKAILTALVGNTANFQTIFDLSDLEKDEAKNFKFKLDLEDVETKLDVVRAKLSDEQNAFLEAVLIAYDGITLKMILGDYKSISQSMIESYKSHQRDWKYIKNNVRLNEQKIEPDKNSVKFFKLDPKKLIYPSNLAYLQVISSNEDEHRKGLDYFKTAIQDADILQRIENDTFLPRQRTKRNGVLPYQLHLAELEQIIKKQSKYYPFLANIYTQDNKTENKLIGLLKFRVPYYVGPLVEAEKVTGDGKNHWLIKKELQENTPITPFNFDDVVDKDKSGEQFIKRITGTDSYLIGEPTLPENSLLYQKYNVLQELNNVRNERHQRLPIKVKQDIFEHVFKIDKNVNAKKVMAYLKLNGYGDFQIAGLSDTRTGKFNSNLSSYNYFVDLLGREKTEKIREDRLEEIIEIQTVFEDKILVAKRLSNLDFLTPQEKSKLSAKHYTGWGRLSQKLLTTQFIKTALSEAGDIIPQSHSIIDLLYYTDKNLMEILNDKTFNVRNWLTEQNKGTESGNSLYDQIDALAGPKDIKRGITQVFSIIDDIKKAMGSNPETVYLEFARETQTSRLTNSRLNRVQEIYNSPELKTEFAYLAKKLEAETKESIHDDRLYLYYLQEGRDMYTGKEIPFDQISSNYDIDHIIPQAFTKDDSLDNRVLVNRATNARKSNSPTFTNDIIDNRKSWWQSLVKRGLMSKEKFERLTDKRKTFSENQTNHFIARQLVETRQIIKNVADLIKNNYDGTQAVAIRASLTGEMRRYLDWPKNRDMNDYHHAHDALMMATVGKYVDRRGFFDNGSVSDGAGNAYNLYTKDWLVAARVGTRNDSQRVNPYGFIVGSMNSKAVRQQVNKETGEIVWGNENLDYLRHVLSYKKILVTRRLSGSSGRLYAETLFSPNPKAKLIAQKANRSVALYGGFTKAESAYTALVEFNKKGDRSYKLIKVPMAIANRVNDKQITVTAYIASLNLRDFSRVVLEHLPLGTLIRESDGSEFYAASSEYKHNAKELWAPKEILRSSKKLDKATADNLIDIFDFLTNDKTISNFKFYEKDLLHLKNVRDKFVEASDEIKIKVLSDVIYELHNDAGWRDPFKHIQEKPAWTMLQVKGGIKLSEKAAIVYQSPTGLFETITIVGE

SEQ ID NO: 1054 - protein, 883 aa, Leuconostoc pseudomesenteroides
MIGVRLFEGADTAAERRGYRTTRRRLSRRRWRLRLLNDIFASELSKIDENFLPRLKYSWVNKNDTDNVHFGVGVFDNSEQEKAFYQDYPTIYHLRQKLMTDNRQHDLREVYLAIHHIVKYRGHFLNSGEISANSSFDAQKFLELLREFDNTFYPDAVKFLNLDQLDLPDKISSEISDSKISKSERVDRVLQHVQLANSGAKKILKAILNAVVGNSVDSVAMFSLSDLDKEEKKKINHPVTDSKPFKYSDKEVEAKLDELSNLLQDEQKIEFLSLLKLSFDGLTLKMLLGNAKSVSEAMVERYKVHKDDLKFIKENILNSFSKDKKKEFDKYYEAHLAEKDVDNVDKYFKKIIDDSIISKDKKIELLQKIDDHDFLPSQRSKINGAIPHQLHRNELDKIISQQSKYYPFLADSYTQNGKTETKLAGLVNFRVPYYVGPLVSKENADRNNPDGGQNHWVEFKENTSLSNLTPWNFNEIVDKDKSAAKFIERLTGMDTYLIGEPTLPQNSLLYQKYNVLQELNNIRVDNHKLDVKIKQDVFEHLFKTQNSVSAKDVKNYLIANGYAAPSIQITGLSDTNEKTFNSKLSSYNYLVDKLGRTFVESVKSDVLEKIIELQTVFEDKTVLLRQLSMISELTLAQANQLAEKHWTGWGRLSRKLLSSKVVDVNKITNSTFYPATSRQTIIDTLYHTQLNLMEIINNAEDLYGVRQWISEQNKSDSSDTNDVYDQIQELAGDKKIKRGITQSFRILDDIVKAMGGEPERVYLEFARENQQSGVSFSRKNLLSKLYENDSLKQTFKELKSQLESETKENLQNDRLYLYYLQQGRDMYSNDELNIDQLSSYDIDHIIPQAYTKDNSFDNRVLVSSKANRLKRMLLWYPVKLSKK

SEQ ID NO: 1055 - protein, 468 aa, Leuconostoc pseudomesenteroides
MKDQGFISKRKFENLTRRGDFSEQQKERFIARALVETRQIIVNVSSLIDSHFNHTKAVAVKSNMTTDMRHYTKVPKNRDINDYHHAHDALFVATVGQYIENKGFMKAGKLSDSVGNEYNRYTKKWIETARKNTNYGRVNPFGFVVGSMQTATRGKLDYETGELKVVKNNYWSKDDLDYLLKVVSYKKILVTTKLQDNKGAMYDANLISAKGSGKKKAQLQISKSKNIDLYGGFNKLQNEYSVLILNHDEYRWLSIPMYARNSSEQYLHDKYPDAKVILNHILVGQPILLSNSSDPQKSKFASLRIATGGDYHNNFEFVPSVDVKKILDNIYLNHSVTDDEYKKVFESLLATLHDKFVFGIHQVMYNKIFDNKYLFDKMPDEAKRNVINSLLKFMNISKNQLGAVGKIGGKVNGVLYGFKTETEKGTSAGQLISNGKMQPHDIFIFQSPTGIFERRVTVAELANVIKDE

SEQ ID NO: 1056 - protein, 1103 aa, Listeria innocua
LKLYPGEKSTGMFAQFISLIVGSKGNFQKPFDLIEKSDIECAKDSYEEDLESLLALIGDEYAELFVAAKNAYSAVVLSSIITVAETETNAKLSASMIERFDTHEEDLGELKAFIKLHLPKHYEEIFSNTEKHGYAGYIDGKTKQADFYKYMKTTLENIEGADYFIAKIEKENFLRKQRTFDNGAIPHQLHLEELEAILHQQAKYYPFLKENYDKIKSLVTFRIPYFVGPLANGQSEFAWLTRKADGEIRPWNIEEKVDFGKSAVDFIEKMTNKDTYLPKENVLPKHSLCYQKYLVYNELTKVRYINDQGKTSYFSGQEKEQIFNDLFKQKRKVKKKDLELFLRNMSHVESPTIEGLEDSFNSSYSTYHDLLKVGIKQEILDNPVNTEMLENIVKILTVFEDKRMIKEQLQQFSDVLDGVVLKKLERRHYTGWGRLSAKLLMGIRDKQSHLTILDYLMNDDGLNRNLMQLINDSNLSFKSIIEKEQVTTADKDIQSIVADLAGSPAIKKGILQSLKIVDELVSVMGYPPQTIVVEMARENQTTGKGKNNSRPRYKSLEKAIKEFGSQILKEHPTDNQELKNNRLYLYYLQNGKDMYTGQDLDIHNLSNYDIDHIVPQSFITDNSIDNLVLTSSAGNREKGNDVPPLEIVQKRKVFWEKLYQGNLMSKRKFDYLTKAERGGLTEADKARFIHRQLVETRQITKNVANILHQRFNYGKDDHGNTMKQVRIVTLKSALVSQFRKQFQLYKVRGVNDYHHAHDAYLNGVVANTLLKVYPQLEPEFVYGDYHQFDWFKANKATAKKQFYTNIMLFFAQKDRIIDENGEILWDKKYLDTVKKVMSYRQMNIVKKTEIQKGEFSKATIKPKGNSSKLIPRKTNWDPMKYGGLDSPNMAYAVVIEYAKGKNKLVFEKKIIRVTIMERKAFEKDEKAFLEEQGYRQPKVLAKLPKYTLYECEEGRRRMLASANEAQKGNQQVLPNHLVTLLHHAANCEVSDGKSLDYIESNREMFAELLAHVSEFAKRYTLAEANLNKINQLFEQNKEGDIKAIAQSFVDLMAFNAMGAPASFKFFETTIERKRYNNLKELLNSTIIYQSITGLYESRKRLDD

SEQ ID NO: 1057 - protein, 1337 aa, Listeria innocua
MKNMKKPYTIGLDIGTNSVGWAVLTDQYDLVKRKMKIAGDSEKKQIKKNFWGVRLFDEGQTAADRRMARTARRRIERRRNRISYLQGIFAEEMSKTDANFFCRLSDSFYVDNEKRNSRHPFFATIEEEVEYHKNYPTIYHLREELVNSSEKADLRLVYLALAHIIKYRGNFLIEGALDTQNTSVDGIYKQFIQTYNQVFASGIEDGSLKKLEDNKDVAKILVEKVTRKEKLERILKLYPGEKSAGMFAQFISLIVGSKGNFQKPFDLIEKSDIECAKDSYEEDLESLLALIGDEYAELFVAAKNAYSAVVLSSIITVAETETNAKLSASMIERFDTHEEDLGELKAFIKLHLPKHYEEIFSNTEKHGYAGYIDGKTKQADFYKYMKMTLENIEGADYFIAKIEKENFLRKQRTFDNGAIPHQLHLEELEAILHQQAKYYPFLKENYDKIKSLVTFRIPYFVGPLANGQSEFAWLTRKADGEIRPWNIEEKVDFGKSAVDFIEKMTNKDTYLPKENVLPKHSLCYQKYLVYNELTKVRYINDQGKTSYFSGQEKEQIFNDLFKQKRKVKKKDLELFLRNMSHVESPTIEGLEDSFNSSYSTYHDLLKVGIKQEILDNPVNTEMLENIVKILTVFEDKRMIKEQLQQFSDVLDGVVLKKLERRHYTGWGRLSAKLLMGIRDKQSHLTILDYLMNDDGLNRNLMQLINDSNLSFKSIIEKEQVTTADKDIQSIVADLAGSPAIKKGILQSLKIVDELVSVMGYPPQTIVVEMARENQTTGKGKNNSRPRYKSLEKAIKEFGSQILKEHPTDNQELRNNRLYLYYLQNGKDMYTGQDLDIHNLSNYDIDHIVPQSFITDNSIDNLVLTSSAGNREKGDDVPPLEIVRKRKVFWEKLYQGNLMSKRKFDYLTKAERGGLTEADKARFIHRQLVETRQITKNVANILHQRFNYEKDDHGNTMKQVRIVTLKSALVSQFRKQFQLYKVRDVNDYHHAHDAYLNGVVANTLLKVYPQLEPEFVYGDYHQFDWFKANKATAKKQFYTNIMLFFAQKDRIIDENGEILWDKKYLDTVKKVMSYRQMNIVKKTEIQKGEFSKATIKPKGNSSKLISRKTNWDPMKYGGLDSPNMAYAVVIEYAKGKNKLVFEKKIIRVTIMERKAFEKDEKAFLEEQGYRQPKVLAKLPKYTLYECEEGRRRMLASANEAQKGNQQVLPNHLVTLLHHVANCEVSDGKSLDYIESNREMFAELLAHVSEFAKRYTLAEANLNKINQLFEQNKEGDIKAIAQSFVDLMAFNAMGAPASFKFFETTIERKRYNNLKELLNSTIIYQSITGLYESRKRLDD

SEQ ID NO: 1058 - protein, 953 aa, Listeria ivanovii
MKKMLANIDGADYFIDQIEEENFLRKQRTFDNGTIPHQLHLEELEAILHQQAKYYPFLRKDYEKIRSLVTFRIPYFIGPLANGQSDFAWLTRKADGEIRPWNIEEKVDFGKSAIDFIEKMTNKDTYLPKENVLPKHSLCYQKYMVYNELTKIRYIDDQGKTHHFSGQEKQQIFNGLFKQQRKVKKKDLERFLYTINHIESPTIEGVEDAFNSSFATYHDLQKGGVTQEILDNPLNADMLEEIVKILTVFEDKRMIKEQLQSFSDVLDGTILKKLERRHYTGWGRLSAKLLTGIRDKHSHLTILDYLMNDDGLNRNLMQLINDSNLSFKSIIEKEQVSTADKGIQSIVAELAGSPAIKKGILQSLKIVDELVGIMGYPPQTIVVEMARENQTTGKGKNNSKPRFISLEKAIKEFGSQILKEHPTDNQCLKNDRLYLYYLQNGKDMYTGKELDIHNLSNYDIDHIIPQSFITDNSIDNRVLVSSTANREKGDNVPLLEVVRKRKAFWEKLYQAKLMSKRKFDYLTKAERGGLTEADKANFIQRQLVETRQITKNVANILYQRFNCKQDENGNEVEQVRIVTLKSTLVSQFRKQFQLYKVREVNDYHHAHDAYLNGVVANTLLKVYPQLEPEFVYGDYHQFDWFKANKATAKKQFYTNIMRFFAKENQIIDKNGEILWDNRYLDTIKKVLSYRQMNIVKKTEIQKGEFSNATVNPKGNSSKLISRKADWNPIKYGGFDGSNMAYSIVIEYEKRKKKTVIKKELIQINIMERVAFEKDQKAFLEEKGYYSPKVLTKIPKYTLYECENGRRRMLGSANEAQKGNQMVLPNHLMTLLYHAKNCEANDGESLAYIEMHREMFAELLAYISEFAKRYTLANDRLEKINMFFEQNKKGDIKVIAKSFDKLKVFNAFGAPRDFEFFETTIKRKRYYNIKELLNATIIYQSITGLYEARKRLED

SEQ ID NO: 1059 - protein, 232 aa, Listeria ivanovii
MMSKLILGLDIGISSVGWGVLDESTNEVVDAGVRLFEEATRNGNEDRRGFRSARRLKRRRQHRLERAKGLIENNGFSCTDINKFNPYQARYNAIFGEVTKDELAAALFHLVKRRGTTIDAPEEEVKDVENELSTKMQLEKNAKKLATKYDYICEIQLEKLKENKVVRDHENRFRTEDYVKEARAILENQQEYYPEVTNEFIESYMALIETRRMYYDGPGSEKSPTPYGQYFI

SEQ ID NO: 1060 - protein, 300 aa, Listeria monocytogenes
DDGLNRNLMQLINDSNLSFKSIIEKEQVSTTDKDLQSIVADLAGSPAIKKGILQSLKIVDELVSIMGYPPQTIVVEMARENQTTVKGKNNSRPRYKSLEKAIKEFGSQILKEHPTDNQELRNNRLYLYYLQNGKDMYTGQELDIHNLSNYDIDHIVPQSFITDNSIDNLVLTSSAGNREKGDDVPPLEIVRKRKVFWEKLFQGNLMSKRKFDYLTKAERGGLTEADKATFIHRQLVETRQITKNVANILHQRFNNETDNHGNNMEQVRIVMLKSALVSQFRKQFQLYKVREVNDYHHAHD

SEQ ID NO: 1061 - protein, 782 aa, Listeria monocytogenes
  VARIANT 722: note = MOD_RES - Any naturally occurring amino acid
IFNDLFKQKRKVKKKDLELFLRNINQIESPTIEGLEDSFNASYATYHDLLKVGMKQEILDNPLNTEMLEDIVKILTVFEDKRMIKEQLQQFSDVLDGVVLKKLERRHYTGWGRLSAKLLVGIRDKQSHLTILEYLMNDDGLNRNLMQLINDSNLSFKSIIEKEQVSTTDKDLQSIVADLAGSPAIKKGILQSLKIVDELVSIMGYPPQTIVVEMARENQTTVKGKNNSRPRYKSLEKAIKEFGSQILKEHPTDNQELKNNRLYLYYLQNGKDIYTGQELDIHNLSNYDIDHIVPQSFITDNSIDNLVLTSSAGNREKGDDVPPLEIVRKRKVFWEKLYQGNLMSKRKFDYLTKAERGGLTEADKARFIHRQLVETRQITKNVANILHQRFNNETDNHGNTMEQVRIVTLKSALVSQFRKQFQLYKVREVNDYHHAHDAYLNGVVANTLLKVYPQLEPEFVYGEYHQFDWFKANKATAKKQFYTNIMLFFAQKERIIDENGEILWDKKYLETIKKVLDYRQMNIVKKTEIQKGEFSKATIKPKGNSSKLIPRKENWDPMKYGGLDSPNMAYAVIIEHAKGKKKIVIEKKLIQINIMERKMFEKDEEAFLEEKGYRHPKVLTKLPKYTLYECEKGRRRMLASANEAQKGNQLVLSNHLVSLLYHAKNCEASDGKSLKYTEAHRETFSELLAQVSEFATRYTLADANLSKINNLFEQNKEGDIKXIAQSFVDLMVFNAMGAPASFKFFEATIDRKRYTNLKELLSSTIIYQSITGLYESRKRLDD

SEQ ID NO: 1062 - protein, 1334 aa, Listeria monocytogenes; identical to SEQ ID NO: 109

SEQ ID NO: 1063 - protein, 1334 aa, Listeria monocytogenes
MKNPYTIGLDIGTNSVGWAVLTDQYDLVKRKMKVAGNSDKKQIKKNFWGVRLFDDGQTAVDRRMNRTARRRIERRRNRISYLQEIFAVEMANIDANFFCRLNDSFYVDSEKRNSRHPFFATIEEEVAYHKNYRTIYHLREELVNSSEKADLRLVYLALAHIIKYRGNFLIEGALDTKNTSVDEVYKQFIQTYNQVFMSNIEEGALAKVEENTEVASILAGKFTRREKFERILRLYPGEKSTGMFAQFISLIVGNKGNFQKVFNLVEKTDIECAKDSYEEDLEALLAIIGDEYAELFVAAKNTYNAVVLSSIITVTATETNAKLSASMIERFDAHEKELGELKAFIKLHLPKQYQEIFNNAEIDGYAGYIDGKTKQVDFYKYLKTTLENVEGADYFITKIEEENFLRKQRTFDNGVIPHQLHLEELEAILHQQAKYYPFLREGYDKIKSLVTFRIPYFVGPLANGQSEFAWLTRKDDGEIRPWNIEEKVDFGKSAVDFIEKMTNKDTYLPKENVLPKHSLCYQKYMVYNELTKIRYIDDQGKTNYFSGREKQQIFNDLFKQKRKVKKKDLELFLRNINHIESPTIEGLEDSFNASYATYHDLLKVGLKQEILDNPLNTEILEDIVKILTVFEDKRMIKEQLEQFSDVLDGVVLKKLERRHYTGWGRLSAKLLVGIRDKQSHLTILDYLMNDDGLNRNLMQLINDSNLSFKSIIEKEQVSTTDKDLQSIVADLAGSPAIKKGILQSLKIVDELVSIMGYPPQTIVVEMARENQTTGKGKNNSKPRYKSLEKAIKDFGSQILKEHPTDNQELKNNRLYLYYLQNGKDIYTGQELDIHNLSNYDIDHIVPQSFITDNSIDNLVLTSSAGNREKGGDVPPLEIVRKRKVFWEKLYQGNLMSKRKFDYLTKAERGGLTEADKARFIHRQLVETRQITKNVANILHQRFNKETDNHGNTMEQVRIVTLKSALVSQFRKQFQLYKVREVNDYHHAHDAYLNGVVANTLLKVYPQLEPEFVYGEYHQFDWFKANKATAKKQFYTNIMLFFAQKERIIDENGEILWDKKYLETIKKVLDYRQINIVKKTEIQKGEFSKATIKPKGNSSKLIPRKENWDPMKYGGLDSPNMAYAVIIEHAKGKKKIVIEKKLIQINIMERKMFEKDEEAFLEEKGYHQPKVLTKLPKYTLYECEKGRRRMLSSANEAQKGNQLVLSNHLVSLLYHAKNCEASDGKSLKYIEAHRETFSELLAQVSEFATKYTLADANLSKINNLFEQNKEGDIKAIAQSFVDLMAFNAMGAPASFKFFEATIDRKRYTNLKELLSSTIIYQSITGLYESRKRLDD

SEQ ID NO: 1064 - protein, 1334 aa, Listeria monocytogenes
MKNPYTIGLDIGTNSVGWAVLTDQYDLVKRKMKVAGNSDKKQIKKNFWGVRLFDDGQTAVDRRMNRTARRRIERRRNRISYLQEIFAVEMANIDANFFCRLNDSFYVDSEKRNSRHPFFATIEEEVAYHKNYRTIYHLREELVNSSEKADLRLVYLALAHIIKYRGNFLIEGALDTKNTSVDEVYKQFIQTYNQVFMSNIEEGALAKVEENTEVASILAGKFTRREKFERILRLYPGEKSTGMFAQFISLIVGNKGNFQKVFNLVEKTDIECAKDSYEEDLEALLAIIGDEYAELFVAAKNTYNAVVLSSIITVTATETNAKLSASMIERFDAHEKELGELKAFIKLHLPKQYQEIFNNAEIDGYAGYIDGKTKQVDFYKYLKTTLENVEGADYFITKIEEENFLRKQRTFDNGVIPHQLHLEELEAILHQQAKYYPFLREGYDKIKSLVTFRIPYFVGPLANGQSEFAWLTRKDDGEIRPWNIEEKVDFGKSAVDFIEKMTNKDTYLPKENVLPKHSLCYQKYMVYNELTKIRYIDDQGKTNYFSGREKQQIFNDLFKQKRKVKKKDLELFLRNINHIESPTIEGLEDSFNASYATYHDLLKVGLKQEILDNPLNTEILEDIVKILTVFEDKRMIKEQLEQFSDVLDGVVLKKLERRHYTGWGRLSAKLLVGIRDKQSHLTILDYLMNDDGLNRNLMQLINDSNLSFKSIIEKEQVSTTDKDLQSIVADLAGSPAIKKGILQSLKIVDELVSIMGYPPQTIVVEMARENQTTGKGKNNSKPRYKSLEKAIKDFGSQILKEHPTDNQELKNNRLYLYYLQNGKDIYTGQELDIHNLSNYDIDHIVPQSFITDNSIDNLVLTSSAGNREKGGDVPPLEIVRKRKVFWEKLYQGNLMSKRKFDYLTKAERGGLTEADKARFIHRQLVETRQITKNVANILHQRFNKETDNHGNTMEQVRIVTLKSALVSQFRKQFQLYKVREVNDYHHAHDAYLNGVVANTLLKVYPQLEPEFVYGEYHQFDWFKANKATAKKQFYTNIMLFFAQKERIIDENGEILWDKKYLETIKKVLDYRQINIVKKTEIQKGEFSKATIKPKGNSSKLIPRKENWDPVKYGGLDSPNMAYAVIIEHAKGKKKIVIEKKLIQINIMERKMFEKDEEAFLEEKGYHQPKVLTKLPKYTLYECEKGRRRMLSSANEAQKGNQLVLSNHLVSLLYHAKNCEASDGKSLKYIEAHRETFSELLAQVSEFATKYTLADANLSKINNLFEQNKEGDIKAIAQSFVDLMAFNAMGAPASFKFFEATIDRKRYTNLKELLSSTIIYQSITGLYESRKRLDD

SEQ ID NO: 1065 - protein, 1099 aa, Listeria monocytogenes
MKNPYTIGLDIGTNSVGWAVLTDQYDLVKRKMKVAGNSDKKQIKKNFWGVRLFDDGQTAVDRRMNRTARRRIERRRNRISYLQEIFAVEMANIDANFFCRLNDSFYVDSEKRNSRHPFFATIEEEVAYHKNYRTIYHLREELVNSSEKADLRLVYLALAHIIKYRGNFLIEGALDTKNTSVDEVYKQFIQTYNQVFMSNIEEGALAKVEENTEVASILAGKFTRREKFERILRLYPGEKSTGMFAQFISLIVGNKGNFQKVFNLVEKTDIECAKDSYEEDLEALLAIIGDEYAELFVAAKNTYNAVVLSSIITVTATETNAKLSASMIERFDAHEKELGELKAFIKLHLPKQYQEIFNNAEIDGYAGYIDGKTKQVDFYKYLKTTLENVEGADYFITKIEEENFLRKQRTFDNGVIPHQLHLEELEAILHQQAKYYPFLREGYDKIKSLVTFRIPYFVGPLANGQSEFAWLTRKDDGEIRPWNIEEKVDFGKSAVDFIEKMTNKDTYLPKENVLPKHSLCYQKYMVYNELTKIRYIDDQGKTNYFSGREKQQIFNDLFKQKRKVKKKDLELFLRNINHIESPTIEGLEDSFNASYATYHDLLKVGLKQEILDNPLNTEILEDIVKILTVFEDKRMIKEQLEQFSDVLDGVVLKKLERRHYTGWGRLSAKLLVGIRDKQSHLTILDYLMNDDGLNRNLMQLINDSNLSFKSIIEKEQVSTTDKDLQSIVADLAGSPAIKKGILQSLKIVDELVSIMGYPPQTIVVEMARENQTTGKGKNNSKPRYKSLEKAIKDFGSQILKEHPTDNQELKNNRLYLYYLQNGKDIYTGQELDIHNLSNYDIDHIVPQSFITDNSIDNLVLTSSAGNREKGGDVPPLEIVRKRKVFWEKLYQGNLMSKRKFDYLTKAERGGLTEADKARFIHRQLVETRQITKNVANILHQRFNKETDNHGNTMEQVRIVTLKSALVSQFRKQFQLYKVREVNDYHHAHDAYLNGVVANTLLKVYPQLEPEFVYGEYHQFDWFKANKATAKKQFYTNIMLFFAQKERIIDENGEILWDKKYLETIKKVLDYRQINIVKKTEIQKGEFSKATIKPKGIPAN

SEQ ID NO: 1066 - protein, 1334 aa, Listeria monocytogenes
MKNPYTIGLDIGTNSVGWAVLTDQYDLVKRKMKVAGNSDKKQIKKNFWGVRLFDEGETAADRRMNRTARRRIERRRNRISYLQEIFALEMANIDANFFCRLNDSFYVDSEKRNSRHPFFATIEEEVAYHKNYRTIYHLREELVNSSEKADLRLVYLALAHIIKYRGNFLIEGALDTKNTSVDGVYKQFIQTYNQVFISNIEEGTLAKMEENTTVADILAGKFTRKEKLERILQLYPGEKSTGMFAQFISLIVGSKGNFQKVFDLVEKTDIECAKDSYEEDLEALLAIIGDEYAELFVAAKNTYNAVVLSSIITVTDTETNAKLSASMIERFDAHEKDLSELKAFIKLHLPKQYEEIFSNVAIDGYAGYIDGKTKQVDFYKYLKTLLENIEGADYFIAKIEEENFLRKQRTFDNGAIPHQLHLEELEAILHQQAKYYPFLKEAYDKIKSLVTFRIPYFVGPLANGQSDFAWLTRKADGEIRPWNIEEKVDFGKSAVDFIEKMTNKDTYLPKENVLPKHSLYYQKYMVYNELTKVRYIDDQGKTNYFSGQEKQQIFNDYFKQKRKVSKKDLEQFLRNMSHIESPTIEGLEDSFNSSYATYHDLLKVGIKQEVLENPLNTEMLEDIVKILTVFEDKRMIKEQLQQFSDVLDGAVLKKLERRHYTGWGRLSAKLLVGIRDKQSHLTILDYLMNDDGLNRNLMQLINDSNLSFKSIIEKEQVSTTDKDLQSIVADLAGSPAIKKGILQSLKIVDELVSIMGYPPQTIVVEMARENQTTVKGKNNSRPRYKSLEKAIKEFGSQILKEHPTDNQELRNNRLYLYYLQNGKDMYTGQELDIHNLSNYDIDHIVPQSFITDNSIDNLVLTSSAGNREKGDDVPPLEIVRKRKVFWEKLFQGNLMSKRKFDYLTKAERGGLTEADKATFIHRQLVETRQITKNVANILHQRFNNETDNHGNNMEQVRIVMLKSALVSQFRKQFQLYKVREVNDYHHAHDAYLNGVVANTLLKVYPQLEPEFVYGEYHQFDWFKANKATAKKQFYTNIMLFFAQKERIIDENGEILWDKKYLETIKKVLDYRQMNIVKKTEIQKGEFSKATIKPKGNSSKLIPRKENWDPMKYGGLDSPNMAYAVIIEHAKGKKKVVFEKKIIRITIMERKAFEKDEKSFLEKQGYRQPKVLTKLPKYTLYECENGRRRMLASANEAQKGNQQVLKGQLITLLHHAKNCEASDGKSLDYIESNREMFGELLAHVSEFAKRYTLADANLSKINQLFEQNKDNDIKVIAQSFVNLMAFNAMGAPASFKFFEATIERKRYTNLKELLSATIIYQSITGLYEARKRLDG

SEQ ID NO: 1067 - protein, 1334 aa, Listeria monocytogenes
MKNPYTIGLDIGTNSVGWAVLTNQYDLVKRKMKVAGNSDKKQIKKNFWGVRLFDDGQTAVDRRMNRTARRRIERRRNRISYLQEIFAVEMANIDANFFCRLNDSFYVDSEKRNSRHPFFATIEEEVAYHKNYRTIYHLREELVNSSEKADLRLVYLALAHIIKYRGNFLIEGALDTKNTSVDGVYEQFIQTYNQVFMSNIEEGTLAKVEENIEVANILAGKFTRREKFERILQLYPGEKSTGMFAQFISLIVGSKGNFQKVFDLIEKTDIECAKDSYEEDLEALLAIIGDEYAELFVAAKNTYNAVVLSSIITVTATETNAKLSASMIERFDAHEKDLGELKAFIKLHLPKQYQEIFNNAAIDGYAGYIDGKTKQVDFYKYLKTILENIEGADYFIAKIEEENFLRKQRTFDNGAIPHQLHLEELEAIIHQQAKYYPFLREDYEKIKSLVTFRIPYFVGPLAKGQSEFAWLTRKADGEIRPWNIEEKVDFGKSAVDFIEKMTNKDTYLPKENVLPKHSLCYQKYMVYNELTKVRYIDDQGKTNYFSGQEKQQIFNDLFKQKRKVKKKDLELFLRNINHIESPTIEGLEDSFNASYATYHDLLKVGMKQEILDNPLNTEMLEDIVKILTVFEDKPMIKEQLQQFSDVLDGGVLKKLERRHYTGWGRLSAKLLVGIREKQSHLTILDYLMNDDGLNRNLMQLINDSNLSFKSIIEKEQVSTTDKDLQSIVADLAGSPAIKKGILQSLKIVDELVSIMGYPPQTIVVEMARENQTTGKGKNNSKPRYKSLEKAIKEFGSKILKEHPTDNQELKNNRLYLYYLQNGKDMYTGQELDIHNLSNYDIDHIVPQSFITDNSIDNLVLTSSAGNREKGGDVPPLEIVRKRKVFWEKLYQGNLMSKRKFDYLTKAERGGLTDADKARFIHRQLVETRQITKNVANILHQRFNNETDNHGNTMEQVRIVTLKSALVSQFRKQFQLYKVREVNDYHHAHDAYLNGVVANTLLKVYPQLEPEFVYGEYHQFDWFKANKATAKKQFYTNIMLFFGQKERIIDENGEILWDKKYLETIKKVLDYRQMNIVKKTEIQKGEFSKATIKPKGNSSKLIPRKENWDPMKYGGLDSPNMAYAVIIEHAKGKKKLIFEKKIIRITIMERKMFEKDEEAFLEEKGYRHPKVLTKLPKYTLYECEKGRRRMLASANEAQKGNQLVLSNHLVSLLYHAKNCEASDGKSLKYIEAHRETFSELLAQVSEFATRYTLADANLSKINNLFEQNKEGDIQAIAQSFVDLMAFNAMGAPASFKFFEATIDRKRYTNLKELLSSTIIYQSITGLYESRKRLDD

SEQ ID NO: 1068 - protein, 874 aa, Listeria seeligeri; identical to SEQ ID NO: 175

SEQ ID NO: 1069 - protein, 1087 aa, unidentified
  source 1..1087: note = Listeriaceae bacterium
MKKLVLGLDIGVASVGWGIIDAENGDVVDTGVRLFSSRDASENESRRTSRQSRRLSRRKKHRRERIKQLLLAHDMDICDIVNENPYELRVKGLNEKLEVSEIYVALTHLAKRRGVSYLDDVVEEGGTIKSEHLNKNMEEIKSGKMPCEIQLERFEKYGQVRGMIEINQDTEESSFLVNIFRTSDYIKEAKTILATQQKFHKQITNEFIDEYIHIMASKRDYFIGPGNEKSRTDYGVYRTNGDTWDNLFEILIGKCSVFPEETRAARSSYVAQEFNLLNDLNNLKISNLESGKLSASQKHDIVEKVKNSKKFGTKDLLKYIASVCECKIEDIGGCRVDKNRKPIMHTFENYRKVHNALNEAGVDLRLSETDYDELMKIMTLNSETLEIKKQCKEKLPQLTEDYLNVCLVLNKKGAFSGWHALSLKAMKLMMPELYGTSKNQMQIIHTMQLGKAYLKPLNQQKYLNSEAILEEIYNPIAARSIRQTIKVTNAILKKYGHLDSVIIEMPRDYQTSEDERKMIEKMQKENEKEKKAALKRAREEYPFPDEAFRNHKELATKLRLWYQQDQFCVYSGRKISVVDLVRNPNQFEIDHIIPQSVSLDDSLNNKVLCFSEENQKKGQQTPFYYHKGKSGNWTYEQYKLFVEKLFDKKKISNKKRELLLFEEDINKWDVRRGFIARNLVDTRYASRVILNSYQQYFGNHEMGTKVKVVRGKFTSQLRKKWRIFKDRNESHSHHAIDALIVAATANLRLWKKNTLGVSDEGKVYDKETGEILPFEKLTESEYNEMMNKEPYLNFKTKLQNIETKVKYSYRVSKKVNRKISDATIYSTRERDGIDYIVGKIKNIYDVKTYKDQFLKRYKKNKEQFLMYQHDPQTFAILENIMATYQDAENPFLAYKKEYGVIRKYSKKGGGSPVTSLKFIDKVLGQKIDLTAKNQAALPKNKKVVLQSITPYRADVYYDEIDKRYHLIGVKYSLFSFSKQGYVINPIAYQKLLEKEQIHSEMKFCFSLYREDIIEFGEDPDSLTRYRFWSKNESGKNKIEVKPIEKPNFEKQTVLTITKKIKILNKYQTDVLGNSFKAQEEKDPRNIE

SEQ ID NO: 1070 - protein, 1345 aa, Marinilabilia sp.
MKKILGLDLGTTSIGWAFIKEPEKDVVGSEIVDMGVRIVALSSDEENDFAKGNTISINADRTLKRGARRNLQRFKLRRDALLEIFKEMKLIPSNFKYAEDGPSSTFSTLKLRDKAAKEKIELDDLVKVLLQINKKRGYRSSRKAKSEEDDGSAIDSMGIAKELYENDLTPGQWVFEALQKGRKNVPDFYRSDLQEEFKKIVNYQSEFYPDVLNSSFVEDWMGKASTPTKQYFNKKGVHLAENKGKREERRLQEYNWRAVAVNSKIDLSEIALILSQINSQISNSSGYLGAISDRSKELYFKNQTVGQYLYQQIKINPHTRLKGQVFYRQDYLDEFEKIWSVQSGFHPQLNDALKKEIRDITIFFQRRLKSQKHLISNCEFEDYHKVVPKSHPIFQEFRIWQNLNNLTLIKKDNLNEKSELALEDKIALANELAFKREQSVKDALNILGLKSSEWEFNFTKIEGNRTNHAFFEAFAKIIEIEDGEPLDLGNLKADDILDQFSEAFLRIGIDPGLLQVNNDIEGPNYEKQPYIQFWHLLYSSEDDQKLKQNLIKKFGFKPDHAKILASISLQDDHASLSSRAIKKILPHLQSGLIYDKACTYAGYNHSSSFTKEENEKRELSSELDLLKKNSLRNPVVEKILNQMINVVNAILKDPNLGKPDEIRVEMARELKANAEQRKNMTSNIASATRDHEKYREILKKEFGLKRVTKNDLLRYKLWLETDGISLYTGKPIEASKLFSKEYDIEHIIPKTRLFDDSFSNKTICERQLNIDKANVTAFSFLQNKLSGDEFEQYQSRVKSLFGKLSKAKIQKLLMANDKIPEDFIARQLQETRYISKKAKEILFEITRRVSVTTGTITDKLREDWGLVEIMKELNWEKYDKLGLTYTIEGKHGERLNKIKDWSKRNDHRHHAMDALTVALTKPAYIQYLNNLNAKELNGKKSTEIFAIEQKYLKRENGKLCFIPPVENIRTEAKKHLSKVLISYKAKNKVVTINKNRTNKKAGFNEQIALTPRGQLHKETVYGKAFHYSTKFEKIGASFDVQKINAVAKKEEREALLKRLAENGDDPKKAFTGKNSLSKMPIYLDLKRNIKLPEKVKTVVLEQNYTIRKNIDPDLKLDKVIDVGVKRILENRLKEFGGNAKLALSNLDENPIWLNKEKGITIKRVKISGVSNVESLHVKKDHFGEPILDQVGNEIPVDFVSTGNNHHVAIYEDEKGNLQEEVVSFFEAVVRQNQGLPIINKNHSLGWKFLFTLKQNEYFVFPSDDFDPTDVDLMDEENYHLISPNLFRVQKFTTKDYFFRHHLETTVEDKSELKGVSFKRLGLPGLNCIKKIRINHLGKIIQVGEY

SEQ ID NO: 1071 - protein, 1091 aa, Mobiluncus mulieris
MDSRKYRVGIDVGTNSVGFAAVEEDDSGSPTRFLNTMVVIHDSGVDSEQKKYAITRLASAGTARRTRRLYRTRRQRLRELDDFISNELGYPLVNLENFADPYEPWKVRADLATTKLPNDELPEAMSIALRHMARHRGWRSPYQRVEALHLHAEISKEFAALKERVVEKTGDVFSDDATPAEVLVDLMGRQKVRGADGVLSGKLRQSDNANELRKIASVQGIDDETLNRIIDRVFSSKSPKGKASERVGMDALPGQGSKPRALKAMPSFQKFRVVSVICNLRIKDSGGDARPLSMEEKEKLIDYLMSSTTDDHVTWTDVADLLHVKRSQLQGTAKEGFDGERPYTRPPVNSTWSKIKDSKIKSLVALWKTGDVDVQSAIVEALSNASVLEDSRPGADIVVAYLESLDDKELESLDKVGLPAGRASYSEDSLERLTERMLRDDCDLFEARKREFNVADDWKPPADPIYAPVGNPGVDRVLKIVNRLLMAAEREWGAPTQINIEHVRSGFSSELMQREFERENERRRAQNEEAVKAILTEKGGNSRVSKYDITRYYAVKRQHCQCLYCGTPITFSDCELDHIVPRKGVGSTNTRVNLAAACRSCNRDKSNLPFAVWAGKASNFDVSIDDAVSRVKQWQRSQNEGVREFRAFQNEVISRLLKTTEDPEIDSRSLESVAWMARELHHRVEYYFQSKGAQTQVSVYRGAVTAQARKSSGLEDKVKMIGGGGKTRLDRRHHAMDAATIALMTPGISTTLSEKNNLRDAQKFTGQSETWKDYCGRTETARKHFAVWKSNMERLTDLFNDKLENDAIPVVQPLRLRLSNSKAHDDGIGKLDSKKLGSVWSLADIDRAATPQIWTALTRCDDFDPTKGLPENANRVIRAQGVKYESEDNIPVFPSNVAAIAVRDGYAEIGSTIHHARIYRIDDGKKTFYSMIRVFAVDLLKHQAEDLFTVKLPPSAISIRTCEDSLRRALSNGTAEYLGWLVPGDEIIVDTSDKAFHTGQIGDLLRNFPVNSFRLTGFPSNSRLRLKPVLLAGEGLRDDAEDSIKKILLGQGWRPAINVLFSKGKPRIVRRNSLGIERPSSNNGLPFSWEA

SEQ ID NO: 1072 - protein, 1233 aa, Mycoplasma canis
MEKKRKVTLGFDLGIASIGWAIVDSETNQVYKLGSRLFDAPDTNLERRTQRGTRRLLRRRKYRNQKFYNLVKRTEVFGLSSREAIENRFRELSIKYPNIIELKTKALSQEVCPDEIAWILHDYLKNRGYFYDEKETKEDFDQQTVESMPSYKLNEFYKKYGYFKGALSQPTESEMKDNKDLKEAFFFDFSNKEWLKEINYFFNVQKNILSETFIEEFKKIFSFTRDISKGPGSDNMPSPYGIFGEFGDNGQGGRYEHIWDKNIGKCSIFTNEQRAPKYLPSALIFNFLNELANIRLYSTDKKNIQPLWKLSSIDKLNILLNLFNLPISEKKKKLTNANINDIVKKESTKSIMLSVEDIDMIKDEWAGKEPNVYGVGLSGLNIEESAKENKFKFQDLKILNVLINLLDNVGIKFEFKDRNDIIKNLELLDNLYLFLIYQKESNNKDSSIDLFIAKNELLNIENLKLKLKEFLLGAGNEFENHNSKTHSLSKKAIDAILPKLLDNNEGWNLEAIKNYDEEIKSQIEDNSSLMAKQDKKYLNDNFLKDAILPPNVKVTFQQAILIFNKIIQKFSKDFEIDKVVIELAREMTQDQENDALKGIAKAQKSKKSLVEERLEANNIDKSVFNDKYEKLIYKIFLWISQDFKDPYTGAQISTNEIVNNKVEIDHIIPYSLCFDDSSANKVLVHKQSNQEKSNSLPYEYIKQGHSGWNWDEFTKYVKRVFVNNVDSILSKKERLKKSENLLTTSYDGYDKLGFLARNLNDTRYATILFRDQLNNYAEHHLIDNKKMFKVIAMNGAVTSFIRKNMSYDNKLRLKDRSDFSHHAYDAAIIALFSNKTKTLYNLIDPSLNGIISKRSEGYWVIEDRYTGEIKELKKEDWTSIKNNVQARKIAKEIEEYLIDLDDEVFFSRKTKRKTNRQLYNETIYGIAAKTDEDGITNYYKKEKFSILDDKDIYLRLLREREKFVINQSNPEVIDQIIEIIESYGKENNIPSRDEAINIKYTKNKINYNLYLKQYMRSLTKSLDQFSEEFINQMIANKTFVLYNPTKNTTRKIKFLRLVNDVKINDIRKNQVINKFNGKNNEPKAFYENINSLGAIVFKNSANNFKTLSINTQIAIFGDKNWDIEDFKTYNMEKIEKYKEIYGIDKTYNFHSFIFPGTILLDKQNKEFYYISSIQTVRDIIEIKFLNKIEFKDENKNPDTSKTPKRLMFGIKSIMNNYEQVDISPFGINKKIFE

SEQ ID NO: 1073 - protein, 1233 aa, Mycoplasma canis
MEKKRKVTLGFDLGIASVGWAIVDSETNQVYKLGSRLFDAPDTNLERRTQRGTRRLLRRRKYRNQKFYNLVKRTEVFGLSSREAIENRFRELSIKYPNIIELKTKALSQEVCPDEIAWILHDYLKNRGYFYDEKETKEDFDQQTIESMPSYKLNEFYKKYGYFKGALSQPTESEMKDNKDLKEAFFFDFSNKEWLKEINYFFNVQKNILSETFIEEFKKIFSFTRDISKGPGSDNMPSPYGIFGEFGDNGQGGRYEHIWDKNIGKCSIFTNEQRAPKYLPSALIFNFLNELANIRLYSTDKKNIQPLWKLSSIDKLNILLNLFNLPISEKKKKLTSANINDIVKKESTKSIMLSVEDIDMIKDEWAGKEPNVYGVGLSGLNIEESAKENKFKFQDLKILNVLINLLDNVGIKFEFKDRNDIIKNLELLDNLYLFLIYQKESNNKDSSIDLFIAKNESLNIENLKLKLKEFLLGAGNEFENHNSKTHSLSKKAIDAILPKLLDNNEGWNLEAIKNYDEEIKSQIEDNSFLMAKQDKKYLNDNFLKDAILPPNVKVTFQQAILIFNKIIQKFSKDFEIDKVVIELAREMTQDQENDALKGIAKAQKSKKSLVEERLEANNIDKSVFNEKYEKLIYKIFLWISQDFKDPYTGAKISANEIVDNKVEIDHIIPYSLCFDDSSANKVLVHKQSNQEKSNSLPYEYIKQGHSGWNWDEFTKYVKRVFVNNVDSILSKKERLKKSENLLTTSYDGYDKLGFLARNLNDTRYATILFRDQLNNYAEHHLIDDKKMFKVIAMNGAVTSFIRKNMSYDNKLRLKNRNDFSHHAYDAAIIALFSNKTKTLYNLIDPSLNGIISKRSEGYWVIEDRYTGEIKELKKEDWTSIKNNVQARKIAKEIEEYLIDLDDEVFFSRKTKRKTNRQLYNETIYGIAAKTDEDGITNYYKKEKLSILDDKDIYLRLLREREKFVINQSNPEVIDQIIEIIESYGKENNIPSRDEAINIKYTKNKINYNLYLKQYMRSLTKSLDQFSEEFINQMIANKTFVLYNPTKNTTRKIKFLRLVNDVKINDIRKNQVINKFNGKNNEPKAFYENINSLGAIVFKNSANNFKTLSINTQIAIFGDKNWDIEDFKTYNMEKIEKYKEIYGIDKTYNFHSFIFPGTILLDKQNKEFYYISSIQTVRDIIEIKFLNKIEFKDENKNQDTSKTPKRLMFGIKSIMNNYEQVDISPFGINKKIFE

SEQ ID NO: 1074 - protein, 1233 aa, Mycoplasma canis; identical to SEQ ID NO: 242

SEQ ID NO: 1075 - protein, 1233 aa, Mycoplasma canis
MEKKRKVTLGFDLGIASVGWAIVDSETNQVYKLGSRLFDAPDTNLERRTQRGTRRLLRRRKYRNQKFYNLVKRTEVFGLSSREAIENRFRELSIKYPNIIELKTKALSQEVCPDEIAWILHDYLKNRGYFYDEKETKEDFDQQTVESMPSYKLNEFYKKYGYFKGALSQPTESEMKDNKDLKEAFFFDFSNKEWLKEINYFFNVQKNILSETFIEEFKKIFSFTRDISKGPGSDNMPSPYGIFGEFGDNGQGGRYEHIWDKNIGKCSIFTNEQRAPKYLPSALIFNFLNELANIRLYSTDKKNIQPLWKLSSVDKLNILLNLFNLPISEKKKKLTSTNINDIVKKESIKSIMISVEDIDMIKDEWAGKEPNVYGVGLSGLNIEENAKENKFKFQDLKILNVLINLLDNVGIKFEFKDRNDIIKNLELLDNLYLFLIYQKESNNKDSSIDLFIAKNKSLNIENLKLKLKEFLLGAGNEFENHNSKSHSLSKKAIDAILPKLLDNNEGWNLEAIKNYDEEIKSQIEDNSSLMAKQDKKYLNDNFLKDAILPPNVKVTFQQAILIFNKIIQKFSKDFEIDKVVIELAREMTQDQENDALKGMAKAQKSKKSLVEERLEANNIDKSVFNDKYEKLIYKIFLWISQDFKDPYTGAQISVNEIVNNKVEIDHIIPYSLCFDDSSANKVLVHKQSNQEKSNSLPYEYIKQGHSGWNWDEFTKYVKRVFVNNVDSILSKKERLKKSENLLTTSYDGYDKLGFLARNLNDTRYATILFRDQLNNYAEHHLIDNKKMFKVIAMNGAVTSFIRKNMSYDNKLRLKDRSDFSHHAYDAAIIALFSNKTKTLYNLIDPSLNGIISKRSEGYWVIEDRYTGEIKELKKEDWTSIKNNVQARKIAKEIEEYLIDLDDEVFFSRKTKRKTNRQLYNETIYGIAAKTDEDGITNYYKKEKFSILDDKDIYLRLLREREKFVINQSNPEVIDQIIEIIESYGKENNIPSRDEAINIKYTKNKINYNLYLKQYMRSLTKSLDKFSEEFINQMIANKTFVLYNPTKNTTRKIKFLRLVNDVKINDIRKNQVINKFNGKNNEPKAFYENINSLGAIVFKNSANNFKTLSINTQIAIFGDKNWDIEDFKTYNMEKIEKYKEIYGIDKTYNFHSFIFPGTILLDKQNKEFYYISSIQTVRDIIEIKFLNKIEFKDENKNQDTSKTPKRLMFGIKSIMNNYEQVDISPFGINKKIFE

SEQ ID NO: 1076 - protein, 1233 aa, Mycoplasma canis
MEKKRKVTLGFDLGIASVGWAIVDSETNQVYKLGSRLFDAPDTNLERRTQRGTRRLLRRRKYRNQKFYNLVKRTEVFGLSSREAIENRFRELSIKYPNIIELKTKALSQEVCPDEIAWILHDYLKNRGYFYDEKETKEDFDQQTVESMPSYKLNEFYKKYGYFKGALSQPTESEMKDNKDLKEAFFFDFSNKEWLKEINYFFNVQKNILSETFIEEFKKIFSFTRDISKGPGSDNMPSPYGIFGEFGDNGQGGRYEHIWDKNIGKCSIFTNEQRAPKYLPSALIFNFLNELANIRLYSTDKKNIQPLWKLSSVDKLNILLNLFNLPISEKKKKLTSTNINDIVKKESIKSIMLSVEDIDMIKYEWAGKEPNVYGVGLSGLNIEESAKENKFKFQDLKILNVLINLLDNVGIKFEFKDRNDIIKNLELLDNLYLFLIYQKESNNKDSSIDLFIAKNKSLNIENLKLKLKEFLLGAGNEFENHNSKTHSLSKKAIDAILPKLLDNNEGWNLEAIKNYDEEIKSQIEDNSSLMAKQDKKYLNDNFLKDAILPPNVKVTFQQAILIFNKIIQKFSKDFEIDKVVIELAREMTQDQENDALKGIAKAQKSKKSLVEERLEANNIDKSVFDDKYEKLIYKIFLWISQDFKDPYTGAKISANEIVNNKVEIDHIIPYSLCFDDSSANKVLVHKQSNQEKSNSLPYEYIKQGHSGWNWDEFTKYVKRVFVNNVDSILSKKERLKKSENLLTTSYDGYDKLGFLARNLNDTRYATILFRDQLNNYAEHHLIDNKKMFKVIAMNGAVTSFIRKNMSYDNKLRLKDRSDFSHHAYDAAIIALFSNKTKTLYNLIDPSLNGIISKRSEGYWVIEDRYTGEIKELKKEDWTSIKNNVQARKIAKEIEEYLIDLDDEVFFSRKTKRKTNRQLYNETIYGIAAKTDEDGITNYYKKEKFSILDDKDIYLRLLREREKFVINQSNPEVIDQIIEIIESYGKENNIPSRDEAINIKYTKNKINYNLYLKQYMRSLTKSLDQFSEEFINQMIANKTFVLYNPTKNTTRKIKFLRLVNDVKINDIRKNQVINKFNGKNNEPKAFYENINSLGAIVFKNSANNFKTLSINTQIAIFGDKNWDIEDFKTYNMEKIEKYKEIYGIDKTYNFHSFIFPGTILLDKQNKEFYYISSIQTVRDIIEIKFLNKIEFKDENKNQDTSKTPKRLMFGIKSIMNNYEQVDISPFGINKKIFE

SEQ ID NO: 1077 - protein, 1239 aa, Mycoplasma cynos
MEEKRKVTLGFDLGVASVGWAIVDSETNEVYKLGSRLFDIPDTNIDRRAKRGSRRLVRRRSYRNQKFYNLIKRTKTFGFLDKEAIEKEFVLLSIKYPNIIELKVKGLQEEVSKSEAVWILHDYLKNRGYFYDDKEEKDDLENPSIESMPSYKLYEFYKEYGYFKGALSSPTESEKNKDSDLEKAIFFNFSNKEWTKEINHFFKIQKNIFSEDFKAKFMEFFSFIRDISKGPGSENMPSQYSIFGKYGDDGMGGKYQHIWDKNIGKCSIFKDKVRAPKYLPSALFFNLLNELSNIRLYSVDKREKSVLWRLSSKDKINIILNILQIILFKNDGKISNLDINKIVKNESIKSIILNEIDLDLIKDMWFEKEPNVYGIGLSGLNIEENKKENRFKFQDLKIFSVFIDLLKKSNINIEFNNEKDIIHNLKLLDELYFFLITQKYSRDKYGSIKKFILNNKSFNIDNLDEKLNIFLSISDDEFDNHNSKTHSLSKEAIYFIFPKLLHNNEGWNLEAIKNYDIDVREEISKHSFGIKKQDKKYLDDAFLDDAILPPSVKVTIKQSILIFNKIIKKFSNKFQIDNVVIELAREMTQEKEMDAQKSLNRLKKSRKKIIEERLNANNIDSKMFRDKTGEISPNYIYKIYLWISQNFKDPYTGENISANDILKNNVEIDHIIPYSLCFDDSSSNKVLVFKHSNQSKGNFLPFDMISTFSENSVWNWKEYTQYVEKTFKTNLESILDKKERVKKADNLLTSSYDGYDKLGFLARNLNDTRYATILFRDQLINYSENHLIDSKKMFKVIAMNGGVTSFIRKNMSFDSGLKVKDRSIFSHHAYDAAIIALFSNKTKILYNLINPSLDGIISKRSEGYWVLEDRLTGEIRKLNYNDWQSIKNNVEVKKIAREIESHLSNLDNVVMFSRKSKRKTNKELYNETLYGIATRIDENGIKNYYKKEKFNILEDENIYLRLLNERENFIINRSNPEVIDAIIEIFETIDKNKIPARDVAKNIKYTDNKIKYNLYLKDYMRKLVDEFPDKFRKDFIEQMIAKKIFILFNPIKNTTRKIKSLRSINNNKIEDIRKKQVLEKFNTAKNEPRSFYESLNSLGAIIFKNNLNIYKKMSISSQIATFGDKNWKIDDINTYNKEKLNKYKEIYGIDETYDFYSFIFPGTILLDEKNKEFLYISSIQTLKDKIELKFLDRIEFEKKNVNSNLKPKIKREIISTKKLMSDYKIIKISPLGINKKIFE

SEQ ID NO: 1078 - protein, 1269 aa, Mycoplasma gallisepticum
MNNSIKSKPEVTIGLDLGVGSVGWAIVDNETNIIHHLGSRLFSQAKTAEDRRSFRGARRLIRRRKYKLKRFINLIWKYNSYFGFKNKEDILNNYQEQQKLHNTVLNLKLEALNAKIDPKALSWILHDYLKNRGHFYEDNRDFNVYPTEELANYFGEYGYYKGIIDSKEDNDDKLEEGLTKYKFSNQHWLEEIKKVLSNQTGLPEKFKEEYESLFSYVRNYSEGPGSINSVSPYGIYHLDEKEGKVVQKYNNIWDKTIGKCSIFPDEYRAPKNSPIAMIFNEINELSTIRSYSIYLTGWFINQEFKKAYLNKLLDLLIKTNSEKPIDARQFKKLREETIAESIGKETLKDVEREEKLEKEDHKWKLKGLKLNTNGKIQYNDLSSLAKFVHKLKQHLKLDFLLEDQYTTLDKINFLQSLFVYLGKHLRYSNRVDSANLKEFSDSNKLFERVLQEQKDDLFKLFEQTDKDDEKILAQTHSLSTKAMLLAITRMTNLDNDEDNQKNNDKGWNFEAIKNFDQKFIDITKKNNNLSLKQDKRYLDDRFINDAILSPGVKRILREATKVFNAILKQFSEEYDVTKVVIELARELSEEKELENTKNYEKLIKKNSDKISERLEALDIAEDKIEDILKSPTKSYKVLLWLQQDHIDPYSQKEIAFEDILTKTEKTEIDHIIPYSISFDDSSSNKLLVLAESNQAKSNQTPYEFITSGNAGIKWEDYEAYCRKFKDGDTSLLDSTQRSKKFAKMMKTDTSSKYDIGFLARNLNDTRYATIVFRDALKDYANNHLVEDKPMFKVVCINGGVTSFLRKNFDKSWYAKKDRDKNIHHAVDASIISIFSNETKTLFNQLTQFADYKLFKNTDGSWKKIDPKTGVVTEVTDENWKQIRVRNQVSEIAKVINKCIQDSNIERKARYSRKIENKTNISLFNDTVYSAKKVGYEDQIKRKNLKTLDIHESAEENKNSKVKKQFVYRKLVNVSLLNNDKLADLFAEKEDILMYRANPWVINLAEQIFNEYTENKKIKSQNVFEKYMLDLTKEFPEKFSEAFVKSMLRNKTAIIYNVEKKVVHRIKRLKILSSELKENKLSNVIIRSKNESGTKLSYQDTINSIALMIMRSIDPTAKKQYIRVPLNTLNLHLGDQDFDLHNIDAYLKKPKFVKYLKANEIGDEYKPWRVLTSGTLLIHKKDKKLMYISSFQNLKDVIEIKNLIETEYKENDDSDPKKKKKANRFLMTLSTILNDYILLDAKDNFDILGLSKNRIDEILNSKLGLDKITK

SEQ ID NO: 1079 - protein, 1224 aa, Mycoplasma gallisepticum
MNNSIKSKPEVTIGLDLGVGSVGWAIVDNETNIIHHLGSRLFSQAKTAEDRRSFRGARRLIRRRKYKLKRFINLIWKYNSYFGFKNKEDILNNYQEQQKLHNTVLNLKLEALNAKIDPKALSWILHDYLKNRGHFYEDNRDFNVYPTEELANYFGEYGYYKGIIDSKEDNDDKLEEGLTKYKFSNQHWLEEIKKVLSNQTGLPEKFKEEYESLFSYVRNYSEGPGSINSVSPYGIYHLDEKEGKVVQKYNNIWDKTIGKCSIFPDEYRAPKNSPIAMIFNEINELSTIRSYSIYLTGWFINQEFKKAYLNKLLDLLIKTNSEKPIDARQFKKLREETIAESIGKETLKDVEREEKLEKEDHKWKLKGLKLNTNGKIQYNDLSSLAKFVHKLKQHLKLDFLLEDQYTTLDKINFLQSLFVYLGKHLRYSNRVDSANLKEFSDSNKLFERVLQEQKDDLFKLFEQTDKDDEKILAQTHSLSTKAMLLAITRMTNLDNDEDNQKNNDKGWNFEAIKNFDQKFIDITKKNNNLSLKQDKRYLDDRFINDAILSPGVKRILREATKVFNAILKQFSEEYDVTKVVIELARELSEEKELENTKNYEKLIKKNSDKISERLEALDIAEDKIEDILKSPTKSYKVLLWLQQDHIDPYSQKEIAFEDILTKTEKTEIDHIIPYSISFDDSSSNKLLVLAESNQAKSNQTPYEFITSGNAGIKWEDYEAYCRKFKDGDTSLLDSTQRSKKFAKMMKTDTSSKYDIGFLARNLNDTRYATIVFRDALKDYANNHLVEDKPMFKVVCINGGVTSFLRKNFDKSWYAKKDRDKNIHHAVDASIISIFSNETKTLFNQLTQFADYKLFKNTDGSWKKIDPKTGVVTEVTDENWKQIRVRNQVSEIAKVINKCIQDSNIERKARYSRKIENKTNISLFNDTVYSAKKVGYEDQIKRKNLKTLDIHESAEENKNSKVKKQFVYRKLVNVSLLNNDKLADLFAEKEDILMYRANPWVINLAEQIFNEYTENKKIKSQNVFEKYMLDLTKEFPEKFSEAFVKSMLRNKTAIIYNVEKKVVHRIKRLKILSSELKENKLSNVIIRSKNESGTKLSYQDTINSIALMIMRSIDPTAKKQYIRVPLNTLNLHLGDQDFDLHNIDAYLKKPKFVKYLKANEIGDEYKPWRVLTSGTLLIHKKDKKLMYISSFQNLKDVIEIKNLIETEYKENDDSDPKKRRKQIGS

SEQ ID NO: 1080 - protein, 1269 aa, Mycoplasma gallisepticum; identical to SEQ ID NO: 133

SEQ ID NO: 1081 - protein, 226 aa, Mycoplasma iowae
MSNKKKITIGLDIGVSSVGWSILREDNVLIDYGSRLFPDAANAKDGKLENEARRSHRSMRRRIRRIKTRKNDLIKLLIKYNIISDQDELAKILEQGIVNETGNVPIVEIKYKGLKEKLSKEELLICLYHYIHKRGYFYITEEDLKENGENINRLPTEIQYDFYMKNGYYIGNEDNQKFSNLIWVKEIEKFLSKQSLDSNFVDEYISLFRRVRDYSDGPGSEKSPTP

SEQ ID NO: 1082 - protein, 1304 aa, Mycoplasma synoviae
MLNNVQNLWKYLLLLIFDKKIIFLFKIKVILIRRYMENNNKEKIVIGFDLGVASVGWSIVNAETKEVIDLGVRLFSEPEKADYRRAKRTTRRLLRRKKFKREKFHKLILKNAEIFGLQSRNEILNVYKDQSSKYRNILKLKINALKEEIKPSELVWILRDYLQNRGYFYKNEKLTDEFVSNSFPSKKLHEHYEKYGFFRGSVKLDNKLDNKKDKAKEKDEEEESDAKKESEELIFSNKQWINEIVKVFENQSYLTESFKEEYLKLFNYVRPFNKGPGSKNSRTAYGVFSTDIDPETNKFKDYSNIWDKTIGKCSLFEEEIRAPKNLPSALIFNLQNEICTIKNEFTEFKNWWLNAEQKSEILKFVFTELFNWKDKKYSDKKFNKNLQDKIKKYLLNFALENFNLNEEILKNRDLENDTVLGLKGVKYYEKSNATADAALEFSSLKPLYVFIKFLKEKKLDLNYLLGLENTEILYFLDSIYLAISYSSDLKERNEWFKKLLKELYPKIKNNNLEIIENVEDIFEITDQEKFESFSKTHSLSREAFNHIIPLLLSNNEGKNYESLKHSNEELKKRTEKAELKAQQNQKYLKDNFLKEALVPLSVKTSVLQAIKIFNQIIKNFGKKYEISQVVIEMARELTKPNLEKLLNNATNSNIKILKEKLDQTEKFDDFTKKKFIDKIENSVVFRNKLFLWFEQDRKDPYTQLDIKINEIEDETEIDHVIPYSKSADDSWFNKLLVKKSTNQLKKNKTVWEYYQNESDPEAKWNKFVAWAKRIYLVQKSDKESKDNSEKNSIFKNKKPNLKFKNITKKLFDPYKDLGFLARNLNDTRYATKVFRDQLNNYSKHHSKDDENKLFKVVCMNGSITSFLRKSMWRKNEEQVYRFNFWKKDRDQFFHHAVDASIIAIFSLLTKTLYNKLRVYESYDVQRREDGVYLINKETGEVKKADKDYWKDQHNFLKIRENAIEIKNVLNNVDFQNQVRYSRKANTKLNTQLFNETLYGVKEFENNFYKLEKVNLFSRKDLRKFILEDLNEESEKNKKNENGSRKRILTEKYIVDEILQILENEEFKDSKSDINALNKYMDSLPSKFSEFFSQDFINKCKKENSLILTFDAIKHNDPKKVIKIKNLKFFREDATLKNKQAVHKDSKNQIKSFYESYKCVGFIWLKNKNDLEESIFVPINSRVIHFGDKDKDIFDFDSYNKEKLLNEINLKRPENKKFNSINEIEFVKFVKPGALLLNFENQQIYYISTLESSSLRAKIKLLNKMDKGKAVSMKKITNPDEYKIIEHVNPLGINLNWTKKLENNN

SEQ ID NO: 1083 - protein, 1401 aa, Myroides injenensis
MKRILGLDLGTTSIGWAYVHEAENVNETSSIQKVGVRVNPLTTEEQTNFEKGKPITTNASRTLARSARRNLQRYKLRRDNLIQILKENNWINNTTSLTETGNHSTFETYELRNKAASEKLTLDQLSRVLLMLNKKRGYKSSRKVNSKEEGQLIDGMEVAKKLYHEQLTPGQLSLQLMNQGVKKLPDYYRSDLNQELESIWNFQQQFYPNILTDKFKEEINGKGLTSTSSAFWNIYNFNTAENKGSRDEKKKQALQWRSEALSKQLSKEIVAYIIADLNGQIYNSSGYLGAISDRSKELYFNNLTVGQYLFKQLKSNPHTSLKNQVFYRQDYLNEFEKIWETQSKFYPKELTAALKREIRDVIIFYQRKLKSQKGLISFCEFEQKQKTINGKTKTIGHRVIPKSSPLFQEFKIWQQLHNVVLRNKKTNEIVSLADEQKVHLFEELNLKGKLKSNQVLKLIENKPKDWELNYTELEGNNTNKALYNAYLDILDIEGYDVRNELKVKLNKDDIELSDLDVNASEIKEMIFSVFKHLGINTEILEFDATLEDKVFEKQASYQLWHLLYSYEEDNSPTGLDRLYNLLHKKFGFKLNHAKLIGNVLFQDDYGSLSSKAIKNIFPYITENNYYTACELAGYKHSKHSLTKEENETRELKNRLTILPKNSLRNPVVEKIINQMINVVNTLIDEENNILIAQGKEPNFQFDEIRIELARELKKNAKEREELTKSINKSKTDHEKIIKILQKEDGIKNPTRNDIVRFKLYSELKNNGYKDLYTNEYIERKDIFTKEYDIEHIIPQSKLFDDSFSNKTLVRRNVNLKKGNQTAYDFILCEYGQEKANEFETRITNLYNLGKDEGISKSKFKKLLMQESEIGNGFIERDLRETQYIAKKAKSLLLEITRNVISTSGSITDRLREDWGLINVMKELNLQKYRDAGLTEFVKMKDGNKKEVIIDWTKRNDHRHHAMDALTIAFTKHNHIQYLNHLNARKNVNNELHNNIIAIEKLETTLVSDERGNKKRIFKEPIANFRTIAKSHLEAILVSHKAKNKVVTKNINKISGKKISQQTLTPRGQLHKETIYGKIRQYVSKQEKVGPKFTIEVIEQVSNPTYRNLLLKRLEENNNDPKKAFGGKNSLNKNPIYINLEKNIKVPEVLKLVWLEDNYTIRKEISPDLKIDKVIDQGVKQILQNRLAQYKGDSKLAFSNLDANPIWLNEDKGIAIKRVTISGIATAQPLHRKKDHLGQPILDHNGQEIPVDFISTGNNHHVAIYEDENGKLQESVVSHFEAVERVNQKLPIIDKTFNQHLGWKFLFTMKQNELFLFPSDDFNPNEIDLFDKQNYTVISKHLFRIQKLSTKDYSFRHHLETNVEEIKDLKTITWRREGLNGIQNIIKVRTNHLGEIIHIGEY

SEQ ID NO: 1084 - protein, 1466 aa, Myroides odoratus
MKNILGLDLGTNSIGWALVKEDFENKQGEILGLGSRIIPMSQDILGEFGRGNSISQTADRTGYRGVRRLRERHLLRRERLHRVLNILGFLPNHYAKEIDFTKRLGKFINHAEPKLSFDKEFIFKDSFNEMLKDFQQNQPGFIINKHGEEALVPYDWTIYYLRKKALTQKIDKEELAWILLNFNQKRGYYQLRGEEEEENTNKLVEFYSLKIIDVIADNEVNKKGEVWYSLHLENGWIYRRSSKISLVDWKDKVRDFIVTTDVNDDGSEKLDKDGVVKRSFRAPSADDWTLLKKKTEQDIDNSNKTVGAYIYENLLLNPKQKIKGKLVRTIERKFYKDELKQILEKQKEFHQELQNEQLLQDCVRELYKYNEQHQQMLESKDFVHLFLNDIIFYQRPLRSQKSLISNCTLEKRVSRDGVVFPIKVISKSNPYYQEFRLLQWLQNLAIYRKDDDVNVTQEFLNSIESWENLLQFLNAKKEIKQEQLIKFLLEQKGLKGNSLKTAILTYRWNYVTDKVYPMNETRSLIQDKLKKVENVATDFLSFDNEMALWHIIYSVNDKIEYEKALAKFASKHNLDEISFVESFKKFPPFKSDYGSFSEKAIKKLLPLMRFGSVWNKNNIVPSVLDRIDKILTGEYDEKIKIRVREKAEQFQLNQIEDFQNLPLWLAQYVVYDRHSEAEIAGKWNSVKDLENYLKEFKQHSLRNPIVEQIITETLRVVKDIWQQYGNGVQNFFDEIHIELGREMKNTADERKRITNSVTENENTNLRIKALLVELKEDTNIENVRPHSPMQQEILKIYEEGVLNAVENIDEDILKISKTAQPSKSELIRYKLWLEQKYQSPYTGEMIPLSRLFTSDYEIEHVIPQSRYFDDSLSNKVICEAAVNKRKDNQLGLEFIKNHHSEKIELGNGRTAQVLEVEAYESFVKKNYDKNRGKRNKLLLEDVPEKMIERQLNDTRYISKFVTHLLSNIVRKDEVNSKDDGINSKNIIPGNGKITSQLKQDWGLNDVWNELILPRFERMNNLTNSTDFTSTNTNGKIIPTVPLEYSKGFSKKRIDHRHHALDALVIALATRDHVNLLNNESALPKKDRTKEEQKSFRFDLQVNLRNKEKYFNVKEGREKEKFTTFKKPWNTLTQDTRDALENMVVSFKQNLRVINKATNYYESYTDENGNLRLDKYGNPKKELISQKGTNWAIRKSLHKETVSGQIHLDRVKVTKGKIVTATRKSLDSSFNEKSIESITDTGIQKILRNYLKAKDNKPDVAFSPEGIEELNKSISVYNEGKNHQPIIKVRIFEQGSKFPVGETGNKIAKFVEAAKGTNLFFGIYQDKTGKRSYDTIPLNLVIERLKQGLSPVPETNEKGHQLLFHLSPNDLVYVPTIDDNEQLDSNRVYKFTDSSDTTCNFIPSNISAIIFNINSKEQEKRGINYPIQNELGVGSPQSKNQKSFDGFMIKEVCIKLKVDRLGNISKT

SEQ ID NO: 1085 - protein, 241 aa, Neisseria lactamica
MAAFKPNPMNYILGLDIGIASVGWAMVEIDKEENPIRLIDLGVRVFERAEMPKTGDSLAMARRLARSVRRLTRRRAHRLLRARRLLKREGVLQDADFDENGLVKSLPNTPWQLRAAALDRKLTCLEWSAVLLHLIKHRGYLSQRKNEGETADKELGALLKGVADNAHALQTGDFRTPAELALNKFEKESGHIRNQRGDYSHTFSRKDLQAELNLLFEKQKEFGNPHVSDGLKEGIETLLMA

SEQ ID NO: 1086 - protein, 666 aa, Neisseria lactamica
MAAFKPNPMNYILGLDIGIASVGWAMVEVDEEENPIRLIDLGVRVFERAEVPKTGDSLAMARRLARSVRRLTRRRAHRLLRARRLLKREGVLQDADFDENGLVKSLPNTPWQLRAAALDRKLTCLEWSAVLLHLVKHRGYLSQRKNEGETADKELGALLKGVADNAHALQTGDFRTPAELALNKFEKESGHIRNQRGDYSHTFSRKDLQAELNLLFEKQKEFGNPHVSDGLKEDIETLLMAQRPALSGDAVQKMLGHCTFEPAEPKAAKNTYTAERFIWLTKLNNLRILEQGSERPLTDTERATLMDEPYRKSKLTYAQARKLLGLEDTAFFKGLRYGKDNAEASTLMEMKAYHAISRALEKEGLKDKKSPLNLSTELQDEIGTAFSLFKTDKDITGRLKDRVQPEILEALLKHISFDKFVQISLKALRRIVPLMEQGKRYDEACAEIYGDHYCKKNAEEKIYLPPIPADEIRNPVVLRALSQARKVINCVVRRYGSPARIHIETAREVGKSFKDRKEIEKRQEENRKDREKAAAKFREYFPNFVGEPKSKDILKLRLYEQQHGKCLYSGKEINLVRLNEKGYVEIDHALPFSRTWDDSFNNKVLVLGSENQNKGNQTPYEYFNGKDNSREWQEFKARVETSRFPRSKNNGFCCKNSMKKDLKNAT

SEQ ID NO: 1087 - protein, 828 aa, Neisseria lactamica
MLGHCTFEPAEPKAAKNTYTAERFIWLTKLNNLRILEQGSERPLTDTERATLMDEPYRKSKLTYAQARKLLGLEDTAFFKGLRYGKDNAEASTLMEMKAYHAISRALEKEGLKDKKSPLNLSTELQDEIGTAFSLFKTDKDITGRLKDRVQPEILEALLKHISFDKFVQISLKALRRIVPLMEQGKRYDEACAEIYGDHYGKKNTEEKIYLPPIPADEIRNPVVLRALSQARKVINAVVRRYDSPARIHIETAREVGKSFKDRKEIEKRQEENRKDREKAAAKFREYFPNFVGEPKSKDILKLRLYEQQHGKCLYSGKEINLVRLNEKGYVEIDHALPFSRTWDDSFNNKVLVLGSENQNKGNQTPYEYFNGKDNSREWQEFKARVETSRFPRSKKQRILLQKFDEEGFKERNLNDTRYVNRFLCQFVADHILLTGKGKRRVFASNGQITNLLRGFWGLRKVRAENDRHHALDAVVVACSTVAMQQKITRFVRYKEMNAFDGKTIDKETGEVLHQKAHFPQPWEFFAQEVMIRVFGKPDGKPEFEEADTSEKLRTLLAEKLSSRPEAVHEYVTPLFVSRAPNRKMSGQGHMETVKSAKRLDEGISVLRVPLTQLKLKDLEKMVNREREPKLYDALKAQLETHKDDPAKAFAEPFYKYDKAGSRTQQVKAVRIEQVQKTGVWVRNHNGIADNATMVRVDVFEKGGKYYLVPIYSWQVAKGILPDRAVVAFKDEEDWTVMDDSFEFRFVLYANDLIKAELKKETFFGYFSGLDRSTGNISLRSHDLDKTKGKDGVYRIGIKTALSFQKHQIDELGKEIRPCRLKKRPPVR

SEQ ID NO: 1088 - protein, 408 aa, Neisseria lactamica
MNDTRYVNRFLCQFVADHILLTGKGKRRVFASNGQITNLLRGFWGLRKVRTENDRHHALDAVVVACSTVAMQQKITRFVRYKEMNAFDGKTIDKETGEVLHQKAHFPQPWEFFAQEVMIRVFGKPDGKPEFEEADTPEKLRTLLAEKLSSRPEAVHEYVTPLFVSRAPNRKMSGQGHMETVKSAKRLDEGISVLRVPLTQLKLKGLEKMVNREREPKLYDALKAQLETHKDDPAKAFAEPFYKYDKAGSRTQQVKAVRIEQVQKTGVWVRNHNGIADNATMVRVDVFEKGGKYYLVPIYSWQVAKGILPDRAVVAFKDEEDWTVMDDSFEFRFVLYANDLIKLTAKKNEFLGYFVSLNRATGAIDIRTHDTDSTKGKNGIFQSVGVKTALSFQKTKSTNSAKKSDHAV

SEQ ID NO: 1089 - protein, 1082 aa, Neisseria meningitidis
MAAFKPNPINYILGLDIGIASVGWAMVEIDEDENPICLIDLGVRVFERAEVPKTGDSLAAARRLARSVRRLTRRRAHRLLRARRLLKREGVLQAADFDENGLIKSLPNTPWQLRAAALDRKLTPLEWSAVLLHLIKHRGYLSQRKNEGETADKELGALLKGVADNAHALQTGDFRTPAELALNKFEKESGHIRNQRGDYSHTFSRKDLQAELILLFEKQKEFGNPHVSGGLKEGIETLLMTQRPALSGDAVQKMLGHCTFEPAEPKAAKNTYTAERFIWLTKLNNLRILEQGSERPLTDTERATLMDEPYRKSKLTYAQARKLLGLEDTAFFKGLRYGKDNAEASTLMEMKAYHAISRALEKEGLKDKKSPLNLSPELQDEIGTAFSLFKTDEDITGRLKDRVQPEILEALLKHISFDKFVQISLKALRRIVPLMEQGKRYDEACAEIYGDHYGKKNTEEKIYLPPIPADEIRNPVVLRALSQARKVINGVVRRYGSPARIHIETAREVGKSFKDRKEIEKRQEENRKDREKAAAKFREYFPNFVGEPKSKDILKLRLYEQQHGKCLYSGKEINLGRLNEKGYVEIDHALPFSRTWDDSFNNKVLVLGSENQNKGNQTPYEYFNGKDNSREWQEFKARVETSRFPRSKKQRILLQKFDEDGFKERNLNDTRYVNRFLCQFVADRMRLTGKGKKRVFASNGQITNLLRGFWGLRKVRAENDRHHALDAVVVACSTVAMQQKITRFVRYKEMNAFDGKTIDKETGEVLHQKTHFPQPWEFFAQEVMIRVFGKPDGKPEFEEADTPEKLRTLLAEKLSSRPEAVHEYVTPLFVSRAPNRKMSGQGHMETVKSAKRLDEGVSVLRVPLTQLKLKDLEKMVNREREPKLYEALKARLEAHKDDPAKAFAEPFYKYDKAGNRTQQVKAVRVEQVQKTGVWVRNHNGIADNATMVRVDVFEKGDKYYLVPIYSWQVAKGILPDRAVVQGKDEEDWQLIDDSFNFKFSLHPNDLVEVITKKARMFGYFASCHRGTGNINIRIHDLDHKIGKNGILEGIGVKTALSFQKYQIDELGKEIRPCRLKKRPPVR

SEQ ID NO: 1090 - protein, 976 aa, Neisseria meningitidis
MAAFKPNPINYILGLDIGIASVGWAMVEIDEDENPICLIDLGVRVFERAEVPKTGDSLAAARRLARSVRRLTRRRAHRLLRARRLLKREGVLQAADFDENGLIKSLPNTPWQLRAAALDRKLTPLEWSAVLLHLIKHRGYLSQRKNEGETADKELGALLKGVADNAHALQTGDFRTPAELALNKFEKESGHIRNQRGDYSHTFSRKDLQAELILLFEKQKEFGNPHVSGGLKEGIETLLMTQRPALSGDAVQKMLGHCTFEPAEPKAAKNTYTAERFIWLTKLNNLRILEQGSERPLTDTERATLMDEPYRKSKLTYAQARKLLGLEDTAFFKGLRYGKDNAEASTLMEMKAYHAISRALEKEGLKDKKSPLNLSPELQDEIGTAFSLFKTDEDITGRLKDRIQPEILEALLKHISFDKFVQISLKALRRIVPLMEQGKRYDEACAEIYGDHYGKKNTEEKIYLPPIPADEIRNPVVLRALSQARKVINGVVRRYGSPARIHIETAREVGKSFKDRKEIEKRQEENRKDREKAAAKFREYFPNFVGEPKSKDILKLRLYEQQHGKCLYSGKEINLGRLNEKGYVEIDHALPFSRTWDDSFNNKVLVLGSENQNKGNQTPYEYFNGKDNSREWQEFKARVETSRFPRSKKQRILLQKFDEDGFKERNLNDTRYVNRFLCQFVADRMRLTGKGKKRVFASNGQITNLLRGFWGLRKVRAENDRHHALDAVVVACSTVAMQQKITRFVRYKEMNAFDGKTIDKETGEVLHQKTHFPQPWEFFAQEVMIRVFGKPDGKPEFEEADTPEKLRTLLAEKLSSRPEAVHEYVTPLFVSRAPNRKMSGQGHMETVKSAKRLDEGVSVLRVPLTQLKLKDLEKMVNREREPKLYEALKARLEAHKDDPAKAFAEPFYKYDKAGNRTQQVKAVRVEQVQKTGVWVRNHNGIADNATMVRVDVFEKGDKYYLVPIYSWQVAKGIFAG

SEQ ID NO: 1091 - protein, 1081 aa, Neisseria meningitidis
MAAFKPNPINYILGLDIGIASVGWAMVEIDEDENPICLIDLGVRVFERAEVPKTGDSLAAARRLARSVRRLTRRRAHRLLRARRLLKREGVLQAADFDENGLIKSLPNTPWQLRSAALDRKLTPLEWSAVLLHLIKHRGYLSQRKNEGETADKELGALLKGVADNAHALQTGDFRTPAELALNKFEKESGHIRNRRGDYSHTFSRKDLQAELDLLFEKQKEFGNPHISDDLKEGIETLLMTQRPALSGDAVQKMLGHCTFEPTEPKAAKNTYTAERFVWLTKLNNLRILEQGSERPLTDTERATLMDEPYRKSKLTYAQARKLLELDDTAFFKGLRYGKDNAEASTLMEMKAYHAISRALEKEGLKDKKSPLNLSPELQDEIGTAFSLFKTDEDITGRLKDRVQPEILEVLLKHISFDKFVQISLKALRRIVPLMEQGKRYDEACAEIYGDHDGKKNTEEKIYLPPIPADEIRNPVVLRALSQARKVINAVVRRYGSPARIHIETAREVGKSFKDRKEIEKRQEENRKDREKAAAKFREYFPNFVGEPKSKDILKLRLYEQQHGKCLYSGKEINLGRLNEKGYVEIDHALPFSRTWDDSFNNKVLVLGSENQNKGNQTPYEYFNGKDNSREWQEFKARVETSRFPRSKKQRILLQKFDEEGFKERNLNDTRYVNRFLCQFVADHMLLTGKGKRRVFASNGQITNLLRGFWGLRKVRAENNRHHALDAVVVACSTVAMQQKITRFVRYKEMNAFDGKTIDKETGEVLHQKTHFPQPWEFFAQEVMIRVFGKPDGKPEFEEADTPEKLRTLLAEKLSSRPEAVHEYVTPLFVSRAPNRKMSGQGHMETVKSAKRLDEGVSVLRVPLTQLKLKDLEKMVNREREPKLYEALKARLEAHKDDPAKAFAEPFYKYDKAGNRTQQVKAVRVEQVQKTGVWVRNHNGIADNATMVRVDVFEKAGKYYLVPIYSWQVAKGILPDRAVVAYADEEGWTVIDESFRFKFVLYSNDLIKVQLKKDSFLGYFSGLDRATGAISLREHDLEKSKGKDGMHRIGVKTALSFQKYQIDEMGKEIRLCRLKKRPPVR

SEQ ID NO: 1092 - protein, 1081 aa, Neisseria meningitidis
MAAFKPNPINYILGLDIGIASVGWAMVEIDEDENPICLIDLGVRVFERAEVPKTGDSLAAARRLARSVRRLTRRRAHRLLRARRLLKREGVLQAADFDENGLIKSLPNTPWQLRSAALDRKLTPLEWSAVLLHLIKHRGYLSQRKNEGETADKELGALLKGVANNAHALQTGDFRTPAELALNKFEKESGHIRNQRGDYSHTFSRKDLQAELILLFEKQKEFGNPHVSGGLKEGIETLLMTQRPALSGDAVQKMLGHCTFEPAEPKAAKNTYTAERFIWLTKLNNLRILEQGSERPLTDTERATLMDEPYRKSKLTYAQARKLLGLEDTAFFKGLRYGKDNAEASTLMEMKAYHAISRALEKEGLKDKKSPLNLSPELQDEIGTAFSLFKTDEDITGRLKDRIQPEILEALLKHISFDKFVQISLKALRRIVPLMEQGKRYDEACAEIYGDHYGKKNTEEKIYLPPIPADEIRNPVVLRALSQARKVINGVVRRYGSPARIHIETAREVGKSFKDRKEIEKRQEENRKDREKAAAKFREYFPNFVGEPKSKDILKLRLYEQQHGKCLYSGKEINLGRLNEKGYVEIDHALPFSRTWDDSFNNKVLVLGSENQNKGNQTPYEYFNGKDNSREWQEFKARVETSRFPRSKKQRILLQKFDEDGFKERNLNDTRYVNRFLCQFVADRMRLTGKGKKRVFASNGQITNLLRGFWGLRKVRAENDRHHALDAVVVACSTVAMQQKITRFVRYKEMNAFDGKTIDKETGEVLHQKTHFPQPWEFFAQEVMIRVFGKPDGKPEFEEADTPEKLRTLLAEKLSSRPEAVHEYVTPLFVSRAPNRKMSGQGHMETVKSAKRLDEGVSVLRVPLTQLKLKDLEKMVNREREPKLYEALKARLEAHKDDPAKAFAEPFYKYDKAGNRTQQVKAVRVEQVQKTGVWVRNHNGIADNATMVRVDVFEKAGKYYLVPIYSWQVAKGILPDRAVVAYADEEGWTVIDESFRFKFVLYSNDLIKVQLKKDSFLGYFSGLDRATGAISLREHDLEKSKGKDGMHRIGVKTALSFQKYQIDEMGKEIRLCRLKKRPPVR

SEQ ID NO: 1093 - protein, 1082 aa, Neisseria meningitidis
MAAFKPNPINYILGLDIGIASVGWAMVEIDEDENPICLIDLGVRVFERAEVPKTGDSLAMARRLARSVRRLTRRRAHRLLRARRLLKREGVLQAADFDENGLIKSLPNTPWQLRAAALDRKLTPLEWSAVLLHLIKHRGYLSQRKNEGETADKELGALLKGVADNAHALQTGDFRTPAELALNKFEKESGHIRNQRGDYSHTFSRKDLQAELILLFEKQKEFGNPHVSGGLKEGIETLLMTQRPALSGDAVQKMLGHCTFEPAEPKAAKNTYTAERFIWLTKLNNLRILEQGSERPLTDTERATLMDEPYRKSKLTYAQARKLLGLEDTAFFKGLRYGKDNAEASTLMEMKAYHAISRALEKEGLKDKKSPLNLSPELQDEIGTAFSLFKTDEDITGRLKDRIQPEILEALLKHISFDKFVQISLKALRRIVPLMEQGKRYDEACAEIYGDHYGKKNTEEKIYLPPIPADEIRNPVVLRALSQARKVINGVVRRYGSPARIHIETAREVGKSFKDRKEIEKRQEENRKDREKAAAKFREYFPNFVGEPKSKDILKLRLYEQQHGKCLYSGKEINLGRLNEKGYVEIDHALPFSRTWDDSFNNKVLVLGSENQNKGNQTPYEYFNGKDNSREWQEFKARVETSRFPRSKKQRILLQKFDEDGFKERNLNDTRYVNRFLCQFVADRMRLTGKGKKRVFASNGQITNLLRGFWGLRKVRAENDRHHALDAVVVACSTVAMQQKITRFVRYKEMNAFDGKTIDKETGEVLHQKTHFPQPWEFFAQEVMIRVFGKPDGKPEFEEADTPEKLRTLLAEKLSSRPEAVHEYVTPLFVSRAPNRKMSGQGHMETVKSAKRLDEGVSVLRVPLTQLKLKDLEKMVNREREPKLYEALKARLEAHKDDPAKAFAEPFYKYDKAGNRTQQVKAVRVEQVQKTGVWVRNHNGIADNATMVRVDVFEKGDKYYLVPIYSWQVAKGILPDRAVVQGKDEEDWQLIDDSFNFKFSLHPNDLVEVITKKARMFGYFASCHRGTGNINIRIHDLDHKIGKNGILEGIGVKTALSFQKYQIDELGEEIRPCRLKKRPPVR

SEQ ID NO: 1094 - protein, 1082 aa, Neisseria meningitidis
MAAFKPNPINYILGLDIGIASVGWAMVEIDEDENPICLIDLGVRVFERAEVPKTGDSLAMARRLARSVRRLTRRRAHRLLRARRLLKREGVLQAADFDENGLIKSLPNTPWQLRAAALDRKLTPLEWSAVLLHLIKHRGYLSQRKNEGETADKELGALLKGVADNAHALQTGDFRTPAELALNKFEKESGHIRNQRGDYSHTFSRKDLQAELILLFEKQKEFGNPHVSGGLKEGIETLLMTQRPALSSDAVQKMLGHCTFEPAEPKAAKNTYTAERFIWLTKLNNLRILEQGSERPLTDTERATLMDEPYRKSKLTYAQARKLLGLEDTAFFKGLRYGKDNAEASTLMEMKAYHAISRALEKEGLKDKKSPLNLSPELQDEIGTAFSLFKTDEDITGRLKDRIQPEILEALLKHISFDKFVQISLKALRRIVPLMEQGKRYDEACAEIYGDHYGKKNTEEKIYLPPIPADEIRNPVVLRALSQARKVINGVVRRYGSPARIHIETAREVGKSFKDRKEIEKRQEENRKDREKAAAKFREYFPNFVGEPKSKDILKLRLYEQQHGKCLYSGKEINLGRLNEKGYVEIDHALPFSRTWDDSFNNKVLVLGSENQNKGNQTPYEYFNGKDNSREWQEFKARVETSRFPRSKKQRILLQKFDEDGFKERNLNDTRYVNRFLCQFVADRMRLTGKGKKRVFASNGQITNLLRGFWGLRKVRAENDRHHALDAVVVACSTVAMQQKITRFVRYKEMNAFDGKTIDKETGEVLHQKTHFPQPWEFFAQEVMIRVFGKPDGKPEFEEADTPEKLRTLLAEKLSSRPEAVHEYVTPLFVSRAPNRKMSGQGHMETVKSAKRLDEGVSVLRVPLTQLKLKDLEKMVNREREPKLYEALKARLEAHKDDPAKAFAEPFYKYDKAGNRTQQVKAVRVEQVQKTGVWVRNHNGIADNATMVRVDVFEKGDKYYLVPIYSWQVAKGILPDRAVVQGKDEEDWQLIDDSFNFKFSLHPNDLVEVITKKARMFGYFASCHRGTGNINIRIHDLDHKIGKNGILEGIGVKTALSFQKYQIDELGKEIRPCRLKKRPPVR

SEQ ID NO: 1095 - protein, 1082 aa, Neisseria meningitidis
MAAFKPNPINYILGLDIGIASVGWAMVEIDEDENPICLIDLGVRVFERAEVPKTGDSLAMARRLARSVRRLTRRRAHRLLRARRLLKREGVLQAADFDENGLIKSLPNTPWQLRAAALDRKLTPLEWSAVLLHLIKHRGYLSQRKNEGETADKELGALLKGVADNAHALQTGDFRTPAELALNKFEKESGHIRNQRGDYSHTFSRKDLQAELILLFEKQKEFGNPHVSGGLKEGIETLLMTQRPALSSDAVQKMLGHCTFEPAEPKAAKNTYTAERFIWLTKLNNLRILEQGSERPLTDTERATLMDEPYRKSKLTYAQARKLLGLEDTAFFKGLRYGKDNAEASTLMEMKAYHAISRALEKEGLKDKKSPLNLSPELQDEIGTAFSLFKTDEDITGRLKDRIQPEILEALLKHISFDKFVQISLKALRRIVPLMEQGKRYDEACAEIYGDHYGKKNTEEKIYLPPIPADEIRNPVVLRALSQARKVINGVVRRYGSPARIHIETAREVGKSFKDRKEIEKRQEENRKDREKAAAKFREYFPNFVGEPKSKDILKLRLYEQQHGKCLYSGKEINLGRLNEKGYVEIDHALPFSRTWDDSFNNKVLVLGSENQNKGNQTPYEYFNGKDNSREWQEFKARVETSRFPRSKKQRILLQKFDEDGFKERNLNDTRYVNRFLYQFVADRMRLTGKGKKRVFASNGQITNLLRGFWGLRKVRAENDRHHALDAVVVACSTVAMQQKITRFVRYKEMNAFDGKTIDKETGEVLHQKTHFPQPWEFFAQEVMIRVFGKPDGKPEFEEADTPEKLRTLLAEKLSSRPEAVHEYVTPLFVSRAPNRKMSGQGHMETVKSAKRLDEGVSVLRVPLTQLKLKDLEKMVNREREPKLYEALKARLEAHKDDPAKAFAEPFYKYDKAGNRTQQVKAVRVEQVQKTGVWVRNHNGIADNATMVRVDVFEKGDKYYLVPIYSWQVAKGILPDRAVVQGKDEEDWQLIDDSFNFKFSLHPNDLVEVITKKARMFGYFASCHRGTGNINIRIHDLDHKIGKNGILEGIGVKTALSFQKYQIDELGKEIRPCRLKKRPPVR

SEQ ID NO: 1096 - protein, 1081 aa, Neisseria meningitidis
MAAFKPNPINYILGLDIGIASVGWAMVEIDEDENPICLIDLGVRVFERAEVPKTGDSLAMARRLARSVRRLTRRRAHRLLRARRLLKREGVLQAADFDENGLIKSLPNTPWQLRAAALDRKLTPLEWSAVLLHLIKHRGYLSQRKNEGETADKELGALLKGVADNAHALQTGDFRTPAKLALNKFEKESGHIRNQRGDYSHTFSRKDLQAELNLLFEKQKEFGNPHISDGLKEGIETLLMTQRPALSGDAVQKMLGHCTFEPTEPKAAKNTYTAERFVWLTKLNNLRILEQGSEQPLTDTQRAKLMDEPYRKSKLTYAQARKLLGLEDTAFFKGLRYGKDNAEASTLMEMKAYHAISRALEKEGLKDKKSPLNLSPELQDEIGTAFSLFKTDEDITGRLKDRVQPEILEALLKHISFDKFVQISLKALRRIVPLMEQGKRYNEACAEIYGDHYGKKNTEEKIYLPPIPADEIRNPVVLRALSQARKVINGVVRRYGSPARIHIETAREVGKSFKDRKEIEKRQEENRKDREKAAAKFQEYFPNFVGEPKSKDILKLRLYEQQHGKCLYSGKEINLGRLNEKGYVEIDHALPFSRTWDDSFNNKVLVLGSENQNKGNQTPYEYFNGKDNSREWQEFKARVETSRFPRSKKQRILLQKFDEDGFKERNLNDTRYVNRFLCQFVADRMRLTGKGKKRVFASNGQITNLLRGFWGLRKVRAENDRHHALDAVVVACSTVAMQQKITRFVRYKEMNAFDGKTIDKETGEVLHQKTHFPQPWEFFAQEVMIRVFGKPDGKPEFEEADTPEKLRTLLAEKLSSRPEAVHEYVTPLFVSRAPNRKMSGQGHMETVKSAKRLDEGVSVLRVPLTQLKLKDLEKMVNREREPKLYEALKARLEAHKDDPAKAFAEPFYKYDKAGNRTQQVKAVRVEQVQKTGVWVRNHNGIADNATMVRVDVFEKGDKYYLVPIYSWQVAKGILPDRAVVAYADEEDWTVIDESFRFKFVLYSNDLIKVQLKKDSFLGYFSGLDRATGAISLREHDLEKSKGKDGMHRIGVKTALSFQKYQIDEMGKEIRPCRLKKRPPVR

SEQ ID NO: 1097 - protein, 1081 aa, Neisseria meningitidis
MAAFKPNPINYILGLDIGIASVGWAMVEIDEEENPIRLIDLGVRVFERAEVPKTGDSLAMARRLARSVRRLTRRRAHRLLRARRLLKREGVLQAADFDENGLIKSLPNTPWQLRAAALDRKLTPLEWSAVLLHLIKHRGYLSQRKNEGETADKELGALLKGVADNAHALQTGDFRTPAELALNKFEKECGHIRNQRGDYSHTFSRKDLQAELNLLFEKQKEFGNPHVSGGLKEGIETLLMTQRPALSGDAVQKMLGHCTFEPAEPKAAKNTYTAERFIWLTKLNNLRILEQGSERPLTDTERATLMDEPYRKSKLTYAQARKLLSLEDTAFFKGLRYGKDNAEASTLMEMKAYHTISRALEKEGLKDKKSPLNLSPELQDEIGTAFSLFKTDEDITGRLKDRIQPEILEALLKHISFDKFVQISLKALRRIVPLMEQGKRYDEACAEIYGDHYGKKNTEEKIYLPPIPADEIRNPVVLRALSQARKVINGVVRRYGSPARIHIETAREVGKSFKDRKEIEKRQEENRKDREKAAAKFREYFPNFVGEPKSKDILKLRLYEQQHGKCLYSGKEINLGRLNEKGYVEIDHALPFSRTWDDSFNNKVLVLGSENQNKGNQTPYEYFNGKDNSREWQEFKARVETSRFPRSKKQRILLQKFDEDGFKERNLNDTRYVNRFLCQFVADRMRLTGKGKKRVFASNGQITNLLRGFWGLRKVRAENDRHHALDAVVVACSTVAMQQKITRFVRYKEMNAFDGKTIDKETGEVLHQKTHFPQPWEFFAQEVMIRVFGKPDGKPEFEEADTPEKLRTLLAEKLSSRPEAVHEYVTPLFVSRAPNRKMSGQGHMETVKSAKRLDEGVSVLRVPLTQLKLKDLEKMVNREREPKLYEALKARLEAHKDDPAKAFAEPFYKYDKAGNRTQQVKAVRVEQVQKTGVWVRNHNGIADNATMVRVDVFEKGDKYYLVPIYSWQVAKGILPDRAVVAYADEEDWTVIDESFRFKFVLYSNDLIKVQLKKDSFLGYFSGLDRATGAISLREHDLEKSKGKDGMHRIGVKTALSFQKYQIDEMGKEIRPCRLKKRPPVR

SEQ ID NO: 1098 - protein, 1082 aa, Neisseria meningitidis
MAAFKPNPINYILGLDIGIASVGWAMVEIDEEENPIRLIDLGVRVFERAEVPKTGDSLAMARRLARSVRRLTRRRAHRLLRARRLLKREGVLQAADFDENGLIKSLPNTPWQLRAAALDRKLTPLEWSAVLLHLIKHRGYLSQRKNEGETADKELGALLKGVADNAHALQTGDFRTPAELALNKFEKECGHIRNQRGDYSHTFSRKDLQAELNLLFEKQKEFGNPHVSGGLKEGIETLLMTQRPALSGDAVQKMLGHCTFEPAEPKAAKNTYTAERFIWLTKLNNLRILEQGSERPLTDTERATLMDEPYRKSKLTYAQARKLLGLEDTAFFKGLRYGKDNAEASTLMEMKAYHAISRALEKEGLKDKKSPLNLSPELQDEIGTAFSLFKTDEDITGRLKDRIQPEILEALLKHISFDKFVQISLKALRRIVPLMEQGKRYDEACAEIYGDHYGKKNTEEKIYLPPIPADEIRNPVVLRALSQARKVINGVVRRYGSPARIHIETAREVGKSFKDRKEIEKRQEENRKDREKAAAKFREYFPNFVGEPKSKDILKLRLYEQQHGKCLYSGKEINLVRLNEKGYVEIDHALPFSRTWDDSFNNKVLVLGSENQNKGNQTPYEYFNGKDNSREWQEFKARVETSRFPRSKKQRILLQKFDEEGFKERNLNDTRYVNRFLCQFVADHILLTGKGKRRVFASNGQITNLLRGFWGLRKVRAENDRHHALDAVVVACSTVAMQQKITRFVRYKEMNAFDGKTIDKETGEVLHQKTHFPQPWEFFAQEVMIRVFGKPDGKPEFEEADTPEKLRTLLAEKLSSRPEAVHEYVTPLFVSRAPNRKMSGQGHMETVKSAKRLDEGVSVLRVPLTQLKLKDLEKMVNREREPKLYEALKARLEAHKDDPAKAFAEPFYKYDKAGNRTQQVKAVRVEQVQKTGVWVRNHNGIADNATMVRVDVFEKGGKYYLVPIYSWQVAKGILPDRAVVQGKDEEDWQLIDDSFNFKFSLHPNDLVEVITKKARMFGYFASCHRGTGNINIRIHDLDHKIGKNGILEGIGVKTALSFQKYQIDELGKEIRPCRLKKRPPVR

SEQ ID NO: 1099 - protein, 1081 aa, Neisseria meningitidis
MAAFKPNPINYILGLDIGIASVGWAMVEIDEEENPIRLIDLGVRVFERAEVPKTGDSLAMARRLARSVRRLTRRRAHRLLRARRLLKREGVLQAADFDENGLIKSLPNTPWQLRAAALDRKLTPLEWSAVLLHLIKHRGYLSQRKNEGETADKELGALLKGVADNAHALQTGDFRTPAELALNKFEKESGHIRNQRGDYSHTFSRKDLQAELILLFEKQKEFGNPHVSGGLKEGIETLLMTQRPALSGDAVQKMLGHCTFEPAEPKAAKNTYTAERFIWLTKLNNLRILEQGSERPLTDTERATLMDEPYRKSKLTYAQARKLLGLEDTAFFKGLRYGKDNAEASTLMEMKAYHAISRALEKEGLKDKKSPLNLSPELQDEIGTAFSLFKTDEDITGRLKDRVQPEILEALLKHISFDKFVQISLKALRRIVPLMEQGKRYDEACAEIYGDHYGKKNTEEEIYLPPITADEIRNPVVLRALSQARKVINAVVRRYGSPARIHIETAREVGKSFKDRKEIEKRQEENRKDREKAAAKFREYFPNFVGEPKSKDILKLRLYEQQHGKCLYSGKEINLVRLNEKGYVEIDHALPFSRTWDDSFNNKVLVLGSENQNKGNQTPYEYFNGKENSREWQEFKARVETSRFPRSKKQRILLQKFDEDGFKERNLNDTRYVNRFLCQFVADRMRLTGKGKKRVFASNGQITNLLRGFWGLHKVRAENDRHHALDAVVVACSTIAMQQKITRFVRYKEMNAFDGKTIDKETGEVLHQKAHFPQPWEFFAQEVMIRVFGKPDGKPEFEEADTPEKLRTLLAEKLSSRPEAVHEYVTPLFVSRAPNRKMSGQGHMETVKSAKRLDEGISVLRVPLTQLKLKDLEKMVNRAREPKLYEALKARLEAHKDDPAKAFAEPFYKYDKAGNRTQQVKAVRVEQVQKTGVWVRNHNGIADNATMVRVDVFEKAGKYYLVPIYSWQVAKGILPDRAVVAYADEEDWTVIDESFRFKFVLYSNDLIKVQLKKDSFLGYFSGLDRATGAISLREHDLEKSKGKDGMHRIGVKTALSFQKYQIDEMGKEIRPCRLKKRPPVR

SEQ ID NO: 1100 - protein, 1082 aa, Neisseria meningitidis
MAAFKPNPINYILGLDIGIASVGWAMVEIDEEENPIRLIDLGVRVFERAEVPKTGDSLAMARRLARSVRRLTRRRAHRLLRARRLLKREGVLQAADFDENGLIKSLPNTPWQLRAAALDRKLTPLEWSAVLLHLIKHRGYLSQRKNEGETADKELGALLKGVANNAHALQTGDFRTPAELALNKFEKESGHIRNQRGDYSHTFSRKDLQAELILLFEKQKEFGNPHVSGGLKEGIETLLMTQRPALSGDAVQKMLGHCTFEPAEPKAAKNTYTAERFIWLTKLNNLRILEQGSERPLTDTERATLMDEPYRKSKLTYAQARKLLGLEDTAFFKGLRYGKDNAEASTLMEMKAYHAISRALEKEGLKDKKSPLNLSSELQDEIGTAFSLFKTDEDITGRLKDRVQPEILEALLKHISFDKFVQISLKALRRIVPLMEQGKRYDEACAEIYGDHYGKKNTEEKIYLPPIPADKIRNPVVLRALSQARKVINGVVRRYGSPARIHIETAREVGKSFKDRKEIEKRQEENRKDREKAAAKFREYFPNFVGEPKSKDILKLRLYEQQHGKCLYSGKEINLVRLNEKGYVEIDHALPFSRTWDDSFNNKVLVLGSENQNKGNQTPYEYFNGKDNSREWQEFKARVETSRFPRSKKQRILLQKFDEDGFKECNLNDTRYVNRFLCQFVADHILLTGKGKRRVFASNGQITNLLRGFWGLRKVRAENDRHHALDAVVVACSTVAMQQKITRFVRYKEMNAFDGKTIDKETGKVLHQKTHFPQPWEFFAQEVMIRVFGKPDGKPEFEEADTPEKLRTLLAEKLSSRPEAVHEYVTPLFVSRAPNRKMSGAHKDTLRSAKRFVKHNEKISVKRVWLTEIKLADLENMVNYKNGREIELYEALKARLEAYGGNAKQAFDPKDNPFYKKGGQLVKAVRVEKTQESGVLLNKKNAYTIADNGDMVRVDVFCKVDKKGKNQYFIVPIYAWQVAENILPDIDCKGYRIDDSYTFCFSLHKYDLIAFQKDEKSKVEFAYYINCDSSNGRFYLAWHDKGSKEQQFRISTQNLVLIQKYQVNELGKEIRPCRLKKRPPVR

SEQ ID NO: 1101 - protein, 1082 aa, Neisseria meningitidis
MAAFKPNPINYILGLDIGIASVGWAMVEIDEEENPIRLIDLGVRVFERAEVPKTGDSLAMARRLARSVRRLTRRRAHRLLRARRLLKREGVLQAADFDENGLIKSLPNTPWQLRAAALDRKLTPLEWSAVLLHLIKHRGYLSQRKNEGETADKELGALLKGVANNAHALQTGDFRTPAELALNKFEKESGHIRNQRGDYSHTFSRKDLQAELILLFEKQKEFGNPHVSGGLKEGIETLLMTQRPALSGDAVQKMLGHCTFEPAEPKAAKNTYTAERFIWLTKLNNLRILEQGSERPLTDTERATLMDEPYRKSKLTYAQARKLLGLEDTAFFKGLRYGKDNAEASTLMEMKAYHAISRALEKEGLKDKKSPLNLSSELQDEIGTAFSLFKTDEDITGRLKDRVQPEILEALLKHISFDKFVQISLKALRRIVPLMEQGKRYDEACAEIYGDHYGKKNTEEKIYLPPIPADEIRNPVVLRALSQARKVINGVVRRYGSPARIHIETAREVGKSFKDRKEIEKRQEENRKDREKAAAKFREYFPNFVGEPKSKDILKLRLYEQQHGKCLYSGKEINLVRLNEKGYVEIDHALPFSRTWDDSFNNKVLVLGSENQNKGNQTPYEYFNGKDNSREWQEFKARVETSRFPRSKKQRILLQKFDEDGFKECNLNDTRYVNRFLCQFVADHILLTGKGKRRVFASNGQITNLLRGFWGLRKVRAENDRHHALDAVVVACSTVAMQQKITRFVRYKEMNAFDGKTIDKETGKVLHQKTHFPQPWEFFAQEVMIRVFGKPDGKPEFEEADTPEKLRTLLAEKLSSRPEAVHEYVTPLFVSRAPNRKMSGAHKDTLRSAKRFVKHNEKISVKRVWLTEIKLADLENMVNYKNGREIELYEALKARLEAYGGNAKQAFDPKDNPFYKKGGQLVKAVRVEKTQESGVLLNKKNAYTIADNGDMVRVDVFCKVDKKGKNQYFIVPIYAWQVAENILPDIDCKGYRIDDSYTFCFSLHKYDLIAFQKDEKSKVEFAYYINCDSSNGRFYLAWHDKGSKEQQFRISTQNLVLIQKYQVNELGKEIRPCRLKKRPPVR

SEQ ID NO: 1102 - protein, 1082 aa, Neisseria meningitidis
MAAFKPNPINYILGLDIGIASVGWAMVEIDEEENPIRLIDLGVRVFERAEVPKTGDSLAMARRLARSVRRLTRRRAHRLLRTRRLLKREGVLQAANFDENGLIKSLPNTLWQLRAAALDRKLTPLEWSAVLLHLIKHRGYLSQRKNEGETADKELGALLKGVAGNAHALQTGDFRTPAELALNKFEKESGHIRNQRGDYSHTFSRKDLQAELNLLFEKQKEFGNPHISDGLKEGIETLLMTQRPALSGDAVQKMLGHCTFEPTEPKAAKNTYTTERFIWLTKLNNLRILEQGSERPLTDTERATLMDEPYRKSKLTYAQARKLLELDDIAFFKGLRYGKDNAEASTLMEMKAYHAISRALEKEGLKDKKSPLNLSPELQDEIGTAFSLFKTDEDITGRLKDRIQPEILEALLKHINFDKFVQISLKALRRIVPLMEQGKRYDEACAEIYGDHYGKKNTEEKIDLPPIPADEIHNPVVLRALSQARKVINGVVRRYGSPARIHIETAREVGKSFKDRKEIEKRQEENRKDREKAAAKFREYFPNFVGEPKSKDILKLRLYEQQHGKCLYSGKEINLGRLNEKGYVEIDHALPFSRTWDDSFNNKVLVLGSENQNKGNQTPYEYFNGKDNSREWQEFKARVETSRFPRSKKQRILLQKFDEDGFKERNLNDTRYVNRFLCQFVADRMRLTGKGKKRVFASNGQITNLLRGFWGLRKVRAENDRHHALDAVVVACSTVAMQQKITRFVRYKEMNAFDGKTIDKETGEVLHQKTHFPQPWEFFAQEVMIRVFGKPDGKPEFEEADTPEKLRTLLTEKLSSRPEAVHEYVTPLFVSRAPNRKMSGQGHMETVKSAKRLDEGISVLRVPLTQLKLKDLEKMVNREREPKLYEALKARLEAHKDDPAKAFAEPFYKYDKAGNRTQQVKAMRVEQVQKTGVWVRNHNGIADNATMVRVDVFEKGDKYYLVPIYSWQVAKGILPDRAVVQGKDEEDWQLIDDSFNFKFSLHPNDLVEVITKKARMFGYFASCHRGTGNINIRIHDLDHKIGKNGILEGIGVKTALSFQKYQIDELGKEIRPCRLKKRPPVR

SEQ ID NO: 1103 - protein, 1082 aa, Neisseria meningitidis
MAAFKPNPINYILGLDIGIASVGWAMVEIDEEENPIRLIDLSVRVFERAEVPKTGDSLAMARRLARSVRRLTRRRAHRLLRARRLLKREGVLQAADFDENGLIKSLPNTPWQLRAAALDRKLTPLEWSAVLLHLIKHRGYLSQRKNEGETADKELGALLKGVADNAHALQTGDFRTPAELALNKFEKESGHIRNQRGDYSHTFSRKDLQAELILLFEKQKEFGNPHVSGGLKEGIETLLMTQRPALSGDAVQKMLGHCTFEPAEPKAAKNTYTAERFVWLTKLNNLRILEQGSERPLTDTERATLMDEPYRKSKLTYAQARKLLGLEDTAFFKGLRYGKDNAEASTLMEMKAYHAISRALEKEGLKDKKSPLRLSPELQDEIGTAFSLFKTDEDITGRLKDRVQPEILEALLKHISFDKFVQISLKALRRIVPLMEQGKRYDEACAEIYGDHYGKKNAEEKIYLPPIPADEIRNPVVLRALSQARKVINGVVRRYGSPARIHIETAREVGKSFKDRKEIEKRQEENRKDREKAAAKFREYFPNFVGEPKSKDILKLRLYEQQHGKCLYSGKEINLGRLNEKGYVEIDHALPFSRTWDDSFNNKVLVLGSENQNKGNQTPYEYFNGKDNSREWQEFKARVETSRFPRSKKQRILLQKFDEDGFKERNLNDTRYVNRFLCQFVADRMRLTGKGKKRVFASNGQITNLLRGFWGLRKVRAENDRHHALDAVVVACSTVAMQQKITRFVRYKEMNAFDGKTIDKETGEVLHQKTHFPQPWEFFAQEVMIRVFGKPDGKPEFEEADTPEKLRTLLAEKLSSRPEAVHEYVTPLFVSRAPNRKMSGQGHMETVKSAKRLDEGVSVLRVPLTQLKLKDLEKMVNREREPKLYEALKARLEAHKDDPAKAFAEPFYKYDKAGNRTQQVKAVRVEQVQKTGVWVRNHNGIADNATMVRVDVFEKGDKYYLVPIYSWQVAKGILPDRAVVQGKDEEDWQLIDDSFNFKFSLHPNDLVEVITKKARMFGYFASCHRGTGNINIRIHDLDHKIGKNGILEGIGVKTALSFQKYQIDELGKEIRPCRLKKRPPVR

SEQ ID NO: 1104 - protein, 1082 aa, Neisseria meningitidis
MAAFKPNSINYILGLDIGIASVGWAMVEIDEEENPIRLIDLGVRVFERAEVPKTGDSLAMARRLARSVRRLTRRRAHRLLRTRRLLKREGVLQAANFDENGLIKSLPNTPWQLRAAALDRKLTPLEWSAVLLHLIKHRGYLSQRKNEGETADKELGALLKGVAGNAHALQTGDFRTPAELALNKFEKESGHIRNQRSDYSHTFSRKDLQAELILLFEKQKEFGNPHVSGGLKEGIETLLMTQRPALSGDAVQKMLGHCTFEPAEPKAAKNTYTAERFIWLTKLNNLRILEQGSERPLTDTERATLMDEPYRKSKLTYAQARKLLGLEDTAFFKGLRYGKDNAEASTLMEMKAYHAISRALEKEGLKDKKSPLNLSPELQDEIGTAFSLFKTDEDITGRLKDRIQPEILEALLKHISFDKFVQISLKALRRIVPLMEQGKRYDEACAEIYGDHYGKKNTEEKIYLPPIPADEIRNPVVLRALSQARKVINGVVRRYGSPARIHIETAREVGKSFKDRKEIEKRQEENRKDREKAAAKFREYFPNFVGEPKSKDILKLRLYEQQHGKCLYSGKEINLGRLNEKGYVEIDHALPFSRTWDDSFNNKVLVLGSENQNKGNQTPYEYFNGKDNSREWQEFKARVETSRFPRSKKQRILLQKFDEDGFKERNLNDTRYVNRFLCQFVADRMRLTGKGKKRVFASNGQITNLLRGFWGLRKVRAENDRHHALDAVVVACSTVAMQQKITRFVRYKEMNAFDGKTIDKETGEVLHQKTHFPQPWEFFAQEVMIRVFGKPDGKPEFEEADTLEKLRTLLAEKLSSRPEAVHEYVTPLFVSRAPNRKMSGQGHMETVKSAKRLDEGVSVLRVPLTQLKLKDLEKMVNREREPKLYEALKARLEAHKDDPAKAFAEPFYKYDKAGNRTQQVKAVRVEQVQKTGVWVRNHNGIADNATMVRVDVFEKGDKYYLVPIYSWQVAKGILPDRAVVQGKDEEDWQLIDDSFNFKFSLHPNDLVEVITKKARMFGYFASCHRGTGNINIRIHDLDHKIGKNGILEGIGVKTALSFQKYQIDELGKEIRPCRLKKRPPVR

SEQ ID NO: 1105 - protein, 67 aa, Neisseria meningitidis
MFGYFASCHRGTGNINIRIHDLDHKIGKNGILEGIGVKTALSFQKYQIDELGKEIRPCRLKKRPPVR

SEQ ID NO: 1106 - protein, 220 aa, Neisseria mucosa
MRHIFSDGLKEGIETLLMTQRPALSGDAVQKMLGHCTFEPTEPKAAKNTYTAERFIWLTKLNNLRILEQGSERPLTNTERATLMDEPYRKSKLTYAQARKLLGLKDTAFFKGLRYGKDNAEASTLMEMKAYHAISRALEKEGLKDKKSPLNLSPELQDEIGTAFSLFKTDEDITGRLKTELTPASNKTLSRPFTVKSASNGSTSAPWLPSTKWFLHFKPA

SEQ ID NO: 1107 - protein, 392 aa, Neisseria sp.
MAPFTLKPLNYILGLDIGIASVGWAVVETDSDVLPYRLIDVGVRTFDRAEVPKTGESPAAARRLARSVRRMIRRRAHRMLRARRLLKREGMLQAADFDAHGLVENLPVNPWQLRVDALSRKLMPLEWAAVLLHMVKHRGYLSQRKNERNSSDKELGALLSGVAANSEALQGGDFRTPAELAVNKFEKESGHIRNQRGDYSHTFNRKDVQAELVLLFEKQKEYGNPYISDGLLTGVEDLLMTQRAALSGDAVQKMLGRCTFEPEEYKAAKNTYSAERFVWLTKLNNLRILDQGSERPLTDSERAKLMDEPYKKTKLTYAQVRRLLELDDTAFFKGLRYSKDNAESATLMEMKAYHSISGALEKAGLKNKKIAAGLIARIAGRNRRGVFAIQNR

SEQ ID NO: 1108 - protein, 701 aa, Neisseria sp.
MQDEIGEAFSLFKTDEDIRGRLKGKLPDEQLDALLEYVSFDKFVQLSLKALRKILPLMEQGKRYDEACAEIYGDHYGIKDDKQAQFLPPVSADEIRNPVVLRALSQARKVVNAVVRRYGSPARVHIETAREVGKSFLDRKKIEKRQEENRKDRERSIAKFREYFPNFVGEPKAKDILKMRLYEQQQGQCLYSGKAIDLRRLNEKGYVEIDHALPFSRTWDDSFNNKVLVLAGENQNKRNQTPFEWLGGDEKRWREFTARVEHCRFPRSKKQRILMQKLDEKDFKERNLNDTRYVNRFLCNFIAQNMLLTGEDKNRVFASNGQITNLLRGMWGLKKVRESNDRHHALDAVVVACSTVAMQQKITNYVRQKEMNVFDGEMVDKTTGEVSRLHFPQPWDFFRQEVMMRVFGKPDTPSENNEEADTPEKLRALLADKLSSRPEAVHEAVTPLFVSRAPSRKMSGQGHMETIKSAKRLSEGKSVLRVPLTQLTPKLLENMVNREREPQLYEDLLGRLNAHGGDPAKAFAAPFFKRDKAGNPTQQVKAVRVEDVQKSGVIVREGNGVADNATMVRVDVFEKGGKYYLMPIYTWQAAKGILPNKAVIAHTDEANWQEMDTSFTFKFALYPNDLVLASLKKETYFGYFAGLDRSTGNISLRVHDLEKSKGKDGVYRIGVKTALSFQKYQVDELGKTIRPCRLKKRPPVR

SEQ ID NO: 1109 - protein, 1089 aa, Neisseria sp.
MTAFKPNPLNYILGLDIGIASVGWAMVEIDDKENPVRLIDLGVRVFERAEMPKTGDSLAAARRLARSVRRLTRRRAHRLLRARRLLKHEGVLKPEDFDENGLVKPLPYIPKQPRNTPWQLRAAALDRKLTPLEWAAVLLHLVKHRGYLSQRKNEGETDDKELGALLKGVADNTHALQAGNFRTPAELALNKFEKESGHIRNQRGDYSHTFSRKDLQAELVLLFEKQKEFGNPYVSDDLKNGIENLLMTQRPALSGDAIQKMLGHCTFEPAEPKAAKNTYTAERFIWLTKLNNLRILNQGNERPLTDAERTTLMDEPYKKSKLTYAQARKLLDLDDTAFFKGLRYGKDNAESATLMEMKAYHAISRALEKEGLKDKKSPLSLSPELQDEIGTAFSLFKTDEEITGRLKGCLQPEILDALLKHISFDKFVQISLKALRRIVPLMEQGKRYDEACAEIYGDHHGRRNSEETLYLPPIPADEIRNPVVLRALSQARKVINGVGRRYGSPARIHIETAREVGKSFKDRKEIEKRQEENRKDREKAAAEFQEYFPNFVGEPKSKDILKLRLYRQQNCKCLYSGKEINLGRLNEKGYVEIDHALPFSRTWDDSFNNKVLVLGSENQNKGNRTPYEYLNGKDNSREWQEFKARVETSRFPHSKKQRILLQKFDEEGFKERNLNDTRYVNRFLCKFVADHMQLTGKGKRRVFASNGQITNLLRGFWGLRKVRAENDRHHALDAVVVACSTVAMQQRITRFVRYKEMNAFDGKTVDKETGEVLHQKTHFPQPWEFFAQEVMIRVFGKPDGKPELEEADTPEKLRALLAEKLSSRPEAVHEYVAPLFVSRAPNRKMSGQGHMETIKSPKRLDEGISVVRVPLTQLKLKDLEKMVNREREPKLYEALKARLEAHKDDPAKAFAEPFYKQDKAGNRTQQVKAVRIEQVQKTGVWVRNQNGIADNATMVRVDVFEKGGKYYLVPIYSWQVAKGILPDKAIIAFKDEEEWQLIDDSFNFKFPLHPNDLVEVITKKARIFGYFASCHRGTGNINIRIHDLDNKVGKNGILEGIGVKTALSFQKYQIDELGKEIRPCRLKKRPPVR

SEQ ID NO: 1110 - protein, 1097 aa, Neisseria wadsworthii
MKKQPQRYILGLDLGIASVGWALILVDGAENPVGLLDCGVRTFERAEVPKTGDSLALARRQARSVRRLIRRRAHRLLRLRRLLKREGILSAADFNSDGLPNLPIDAWQLRVAGLERKLTNQEWAAVLLHLVKHRGYLSQRKSETQTENKELGRLLAGVAENSKLLSESSEQYRTPAELAVKLFAEQSGHLRNKGGEYTHTFNRLDLQKELHLLFERQYALGNPFASAELQSKVDELLMTQRSALQGEAVLKMLGKCTFEPSEYKAAKNTYSAERFIWLTKLNNLRILYNGEERALDEGDRKKLLDEPYKKAKLTYKQVRSILNLPESAVFKGLRYGKDSDGLKAENGTLMEMKAYHKIRTILDKAGLKGEWENRIRNPEILDKIGTAFSLYKTDEDIQAALADLRLPENVLDALLAGLNFDKFIQLSLKALRNILPLMERGIRYDEACKEVYGDHRALAESKNQVLLPPIPADEIRNPVVLRTLTQARKVINAIIRRYGSPQRVHIETARELGKSKQERDKIDRKNKENQNDRNRLASDIRKHFNFEPTPKDILKLRLYEQQHGKCLYSDLREEKGECLYTGNVIELHRLFEDGYVEIDHALPLSRTWDNSLNNKVLVLKSSNQNKGNKTPYEWLDGANNSRRWREFQARVQGCHFPYVKKQRIQTAKLDSKAEQGFLERNLNDTRYISKFMCQFITANLRLAETSNALMEEVAGENPYWKERKRQRVFAPSGSIIALLRGLWGLKKVREDNDRHHALDAIVVACSTVSMQQKITKAMQRRETLETVDSETGEVKTRIPQPWDFFRQEVMIRVFSDSPREELAEKLNSRPEALHDFVSPLFVSRAPNRKMTGQGHLETVKSAKRLSENISVVRKPLTALKLKDIENIVGYPDREPALYQALRERLLAHKDDPVKAFADKPFYKPAKDGGQGSLVKAVRIIENTKHGLKIRNGITDTNGDMVRTDVYQKTDKKGKRQYFIVPVYAWQVEKNELPTVDCKGYEIDDNYEFCFSLYKYDLIEIQNPNDINQELRAYYINCDSSDGRFWLAYHDKSAKEQQFRISTQNQPIIKKYQVDTLGKEIRLCKAEKRTALNGKKKK

SEQ ID NO: 1111 - protein, 1426 aa, Niabella soli
MPRKNILGLDLGTTSIGFAKIIEDDDYQCSSVELIGVRVNPLTTDEQTNFEKGKPVSVNADRTLKRGMRRNLDRYQLRRDYLIEILRTHHIITADTKLAEDGKNTTHTTYALRALAATAEIPLEAFVRVLLAINKKRGYKSSRKAKNEDEGQLIDGMAIARRLYEESLTPGQFSYQLLKEGKKYLPDFYRSDLNTELNKVWNFQKQFYPEILTDEFKRHLEGKGQRATAVAFWGQHGFSMAENKGSREEKKLHAYKWRSEAAHKQLTKEEVAFVITEINNDLNKSSGYLGAISDRSKELFFNKQTVGQYLHQQLKENPHTRLKGQVFYRQDYLDEFETIWEMQAKFYSALTLELKEEVRDVVIFYQRKLKSQMGLISLCEFESKEIEIEKNGEKAKKRIGLRVAPKSSPLFQEFKIWQVLNNLEFRNKKTKEVFVPEMAAKQQLFDELNIKGNLLASEAIKILGYKTKDWEANYHTLEGNRTNKSLYDAWLKILELEGYDENLLKLSGSDDIDVSKIEKPALEIRQMVLAVFEVLGISGAILDFDAEADGKAFEQQPAYQLWHLLYSAEDDGKKYSQEDIFTYGHDNIGLKKKLCEKFGFRPEHTKILVNVVFSDDYGNLSSKAMRRIYPFIKELTYDKACAEAGYRHSAASLTKEEIAARPLQNRLDLLKKNELRSPVVEKILNQMVNVVNTLVDDENQNRKARGLSEDFHFDEIRIELARELKKNAKERAEMTTNINTAKQSHEKIIRILQTEFGVPNPSRNDIVRYKLYEELKNNGYKDLYTNTYISRDILFSKQIDVDHIIPQMSLFDDSFSNKTVVFRKDNQDKGNKTAYDYILGKYGEQALEEYISRITSLFELGKKNKEEGIGKAKFQKLQKRLVDIGDGFIERDLRESQYIAKKANNMLYAICRSVVSTSGEITARLREDWDLVNVMQEINLPKFRALGLTEMVEKKDGAQKERITDWTKRNDHRHHAMDALAIAFTRHSHIQYLNHLNARKDEANKWHPVVSKIEEKETVLIYDDLGNRKRKFKAPMPNFREVVKEHLENVLISHKAKNKVVTKNKNKIKTVRGEKVKTELTPRGQLHKETIYGRYRYYESKEEKIGPKFDAEMIGMVTNPQYKKLLLERLAANGNDPKKAFWGKNALNKNPLYVDEARQELLPEKILLRWLNDDYSIRKDVTPENLKDIKTIEKILDKGVKKILLKRLADFGNDPKKAFSDLDKNPIWQNEAKRIAIKRVTISGIKNAAPLHHKKDHLGNDILDEKGKQIPSSFVSTGNNHHVAIYRDAEGNLQERVVSLFDAVQLVNGGEPVIDKEYNKGIGWQFLFTMKQNEMFVFPDEKTGFNPREVDLLSSGNRKLISPNLFRVQKLASKNYFFRHHLETSVEEKKELKNIAYKPQLGLNALSNIVKVRINHIGEIVSVGEY

SEQ ID NO: 1112 - protein, 79 aa, Nitritalea halalkaliphila
MPLRLPERVYKMISSTGAECHFLPVNVSSLIKGYDAKSKLGEFGSQNKQEVTSDSFIRVKERCYKLEINRLGIPLNRLK

SEQ ID NO: 1113 - protein, 1498 aa, Odoribacter laneus
METTLGIDLGTNSIGLALVDQEEHQILYSGVRIFPEGINKDTIGLGEKEESRNATRRAKRQMRRQYFRKKLRKAKLLELLIAYDMCPLKPEDVRRWKNWDKQQKSTVRQFPDTPAFREWLKQNPYELRKQAVTEDVTRPELGRILYQMIQRRGFLSSRKGKEEGKIFTGKDRMVGIDETRKNLQKQTLGAYLYDIAPKNGEKYRFRTERVRARYTLRDMYIREFEIIWQRQAGHLGLAHEQATRKKNIFLEGSATNVRNSKLITHLQAKYGRGHVLIEDTRITVTFQLPLKEVLGGKIEIEEEQLKFKSNESVLFWQRPLRSQKSLLSKCVFEGRNFYDPVHQKWIIAGPTPAPLSHPEFEEFRAYQFINNIIYGKNEHLTAIQREAVFELMCTESKDFNFEKIPKHLKLFEKFNFDDTTKVPACTTISQLRKLFPHPVWEEKREEIWHCFYFYDDNTLLFEKLQKDYALQTNDLEKIKKIRLSESYGNVSLKAIRRINPYLKKGYAYSTAVLLGGIRNSFGKRFEYFKEYEPEIEKAVCRILKEKNAEGEVIRKIKDYLVHNRFGFAKNDRAFQKLYHHSQAITTQAQKERLPETGNLRNPIVQQGLNELRRTVNKLLATCREKYGPSFKFDHIHVEMGRELRSSKTEREKQSRQIRENEKKNEAAKVKLAEYGLKAYRDNIQKYLLYKEIEEKGGTVCCPYTGKTLNISHTLGSDNSVQIEHIIPYSISLDDSLANKTLCDATFNREKGELTPYDFYQKDPSPEKWGASSWEEIEDRAFRLLPYAKAQRFIRRKPQESNEFISRQLNDTRYISKKAVEYLSAICSDVKAFPGQLTAELRHLWGLNNILQSAPDITFPLPVSATENHREYYVITNEQNEVIRLFPKQGETPRTEKGELLLTGEVERKVFRCKGMQEFQTDVSDGKYWRRIKLSSSVTWSPLFAPKPISADGQIVLKGRIEKGVFVCNQLKQKLKTGLPDGSYWISLPVISQTFKEGESVNNSKLTSQQVQLFGRVREGIFRCHNYQCPASGADGNFWCTLDTDTAQPAFTPIKNAPPGVGGGQIILTGDVDDKGIFHADDDLHYELPASLPKGKYYGIFTVESCDPTLIPIELSAPKTSKGENLIEGNIWVDEHTGEVRFDPKKNREDQRHHAIDAIVIALSSQSLFQRLSTYNARRENKKRGLDSTEHFPSPWPGFAQDVRQSVVPLLVSYKQNPKTLCKISKTLYKDGKKIHSCGNAVRGQLHKETVYGQRTAPGATEKSYHIRKDIRELKTSKHIGKVVDITIRQMLLKHLQENYHIDITQEFNIPSNAFFKEGVYRIFLPNKHGEPVPIKKIRMKEELGNAERLKDNINQYVNPRNNHHVMIYQDADGNLKEEIVSFWSVIERQNQGQPIYQLPREGRNIVSILQINDTFLIGLKEEEPEVYRNDLSTLSKHLYRVQKLSGMYYTFRHHLASTLNNEREEFRIQSLEAWKRANPVKVQIDEIGRITFLNGPLC

SEQ ID NO: 1114 - protein, 1389 aa, Oenococcus kitaharae; identical to SEQ ID NO: 236

SEQ ID NO: 1115 - protein, 1535 aa, Ornithobacterium rhinotracheale
MNTILGLDLGTNSIGWALIKVLNDKTRLPLEIIDLGVVVIPTDQRTLDKFSKGESISKTAERTKQKGVRKLYERKKLRRERLHRVLNILGFLPEHYSKKIDFKKHLGQFFGNSQPKISYVENDHGKHEFIFMDSYREMLKEFSKHNIKNVPYDWTIYYLRKKALSQKISKEELAWVILNFNKKRGYYQFRDDNADENKENKIEKYYALKVTNVKKEDAQNYTITLENGWIYKNKSKISLLDWVGSTKEFISTEKFDNKGNIIKKKNGEDDRTLKLVDSEKDWIAIKKSTEDRIENYGKTVGTYLYEHLLKDPNQKLNGELINIIDRKFYKNELKQILEKQKEFHPELLNEDLFQKSIIELYPKNSTRQKELKNKDLCYLLIDDVIYYQRDLKKKNSTINKCSFESREYYLNGEKQIQKINCIAKSKPLYQEFRTLQFIKNLKVYEIIDGLEKDITSKLLPDFETKEHFFEWLNDKEKIDQLQLLSYKCFDLHDNVKNDLIAKGIKRPTEKAIRTELLEKYRWNYSKDNDRNFLLNETRFKILKYLKKVDKKLTLTNEQIESLWLLLYSAKDERELKNGLQKFSEKNKLPKKFSDIFISFPPFKKEYGAYSEKALKKLLSLVRFGKYWSFNKIDNNIQNKIMNILNGEVDDSISDRVREKTILLQDKNDFQDLPLWLASYVAYNRFSEVSEIKYWDSPDKIEFLKQHSIGNPIVEKIINETLKLIKDIWVIHGKSCKNFFSEIHIELSREIKSSSKKRAQITNNNTKNQKLNNLIKSLLIEMASDTKYENVTPYSPSQQEILKIYDEGIYSKEENSEKIKEINKIRNNNKISKSDITKYKLWLEQGYISPYTGKIIPLTKLFTAKYQKEHIIPQTKFFDDSFNNKVICEAEVNKLKDNSLAMNFIKAKGGKAVKLSDGETVTILNQEEYKQLVRTSFKKNSIKLRNLLLEEIPDTFTKRQLNDTKYISKLVLSLLSNIVREKGELESTAKRIVSTNGQITSILRNDWGLNNIWNKLITPRFERLNNINKNKIYGNWENKKGKNVFQINYLNDNLSTLNTKRIDHRHHALDALIVACTTRNHINFLNNQYAKSRNQRHDLRAKLKRRETITTEGSKKQVFKDFIKPWESFTQDALKKLETTIVNFKVNKRIINKTINWYKKWEKQKDGTYKKIQKKQTKGDAWAIRKPLHIDTIYGIVCKKLPLKSALENYKNIIDENLKHKIKELKEVNKFDNNQIINFFKECNFIFEDNNIQKVEVYDFKDNRDKTILSSSRQLIDESFTPKKIGKVLDPTIRNILLKHLNSTKYNNKFDSDGNPIKPEKLAFSPEGLKDLNKNIKHLNNNKEHQPIKRVKLFETLGNKIKVGYTQQKNKKFAETATGTNLFLGIYSDNNKRDFKTIPLILAIQREKEGLNPCPDTDEKGNQLLFSLSPNELVFVPNNEERKNPNLVDFENLSKDQIDRIYKFVSCTGSEAYFVPSRTAKPIIENENGTNNKSQRIIEFNEKTSIKNEKNEPVLIKTICWKIEVNRLGKIIKVIK

SEQ ID NO: 1116 - protein, 103 aa, ParaBacteroides merdae
MIVYRLFYRFLFKATKLVNFVIHKELKRQIARTGKIKFHSGGCGCQSGNYKMQNFEKGKSITTNADRTLKRSMRRNLYRCKLRRDVLIELLKKVGFIPEKQWK

SEQ ID NO: 1117 - protein, 82 aa, ParaBacteroides merdae
MSIWKLQYPPLDLKIYNKFLVYSRVNPLTVDEMQNFEKGKSITTNADRTLKRSMRRNLQRYKLRRDVLIELLKKVGFMSEKQ

SEQ ID NO: 1118 - protein, 84 aa, ParaBacteroides merdae
MSIWKLQYPPLDLKIYNKFLVYSRVNPLTVDEMQNFEKGKSITTNADRTLKRSMRRNLYRCKLRRDVLIELLKKVGFIPEKQWK

SEQ ID NO: 1119 - protein, 398 aa, Pasteurella bettyae
MLANENQNKGNLTPYEWLDGKNNSKRWQDFVARVQTCCFSHRKKQHILSHKLDEKSFIERNLNDTRYVARFLCNFIADNMLLTGKGKRKVFASNGQITALLRGRWGLQKVRDDNDRHHALDAVVIACSTVAMQQKITRFVKYEEGNVFSGERIDRETGEIIPLYFPTPWKFFKENVEIRIFSENPKLELENRLPDYPQYNHEFVQPLFVSRMPTRKMTGQGHMETIKSAKRLDEGISVLKVPLTQLKLADLENMVNRERELALYEALKERLELFGNDPAKAFIEPFYKKGGALVKAVRVKKVQKSGVLVRDGNGVADNALMVRVDVFTKGGKYFLVPIYTWQVAKGILPNKAVTANIDEIDWLEMDESYQFIFTMYPNDLVKVKLKKEEFFGYYGGLD

SEQ ID NO: 1120 - protein, 610 aa, Pasteurella bettyae
MNMLKPLNYILGLDLGIGSVGWAVVEIDEQGNPLRLIDVGVRTFERAEVAKTGESLALARRLARSSRRLVKRRAARIKKAKRLLKAENILLSVDEILPNDVWQLRVKGLDHKLERQEWAAVLLHLLKRRGYLSQRKNESKSENKELGALLSGVVTNHQILQTDEYRTPAEIAVHKFQAEDGHIRNQRGDYTHTFSRLDLLAEMELLFQRQTELGNLHTSSKLLENLTALLMWQKPALAGEAILKMLGKCTFEPTEYKAAKNSYSAERFVWLTKLNNLRILEQGAERALTDSERFVLLDQPYEKAKLTYAQVRTLLKLSDEAIFKGVRYQGEDKKTVESKTTLMEMKAYHQIRKALDGADLKDEWNTLKNDSALLDEIGTAFSLYKTDDDISHYLGGKLSEKVLNVLLENLNFDKFIQLSLKALQKILPLMLQGQRYDEAVSAVYGDHYGKKSAESCRLLPAIPANEIHNPVVLRTLTQARKVINAVVRLYGSPARIHIETGRKVGKSYQDRKKLEKQQEENREQRESAVKKFKEYFPNFVGEPKGKDILKLRLYELQQSKCLYSGKSFDPNRLLEKGYVEVDHALPFSRTWDDSFNNKVCLPMKTRIKAI

SEQ ID NO: 1121 - protein, 199 aa, Pasteurella multocida
MACATPSMQQKITRFIRFKEVHPYKIENRYEMVDQESGEIISPHFPEPWAYFRQEVNIRVFDNHPDTVLKEMLPDRPQANHQFVQPLFVSRAPTRKMSGQGHMETIKSAKRLAEGISVLRIPLTQLKPNLLENMVNKEREPALYAGLKARLAEFNQDPAKAFTTPFYKQGGQQVKAIRVEQVQKSGVLVRENNGVADNA

SEQ ID NO: 1122 - protein, 63 aa, Pasteurella multocida
MQTTNLSYILGLDLGIASVGWAVVEINENEDPIGLIDVGVRIFERAEVPKTGESLALSRRLAR

SEQ ID NO: 1123 - protein, 1058 aa, Pasteurella multocida
MQTTNLSYILGLDLGIASVGWAVVEINENEDPIGLIDVGVRIFERAEVPKTGESLALSRRLARSTRRLIRRRAHRLLLAKRFLKREGILSTTDLEKGLPNQAWELRVAGLERRLSAIEWGAVLLHLIKHRGYLSKRKNESQTNNKELGALLSGVAQNHQLLQSDDYRTPAELALKKFAKEEGHIRNQRGAYTHTFNRLDLLAELNLLFAQQHQFGNPHCKEHIQQYMTELLMWQKPALSGEAILKMLGKCTHEKNEFKAAKHTYSAERFVWLTKLNNLRILEDGAERALNEEERQLLINHPYEKSKLTYAQVRKLLGLSEQAIFKHLRYSKESAESATFMELKAWHAIRKALENQGLKDTWQDLAKKPDLLDEIGTAFSLYKTDEDIQQYLEGKLPDSVINALLVSLNFDKFIELSLKSLRKILPLMEQGKRYDQACHEIYGHHYGEKNQQISQLLPVIPTQEIRNPVVLRTLSQARKVINAIIRQYGSPARVHIETGRELGKSFKERREIQKQQEDNRTKRESAVQKFKELFSDFSSEPKSKDILKFRLYEQQHGKCLYSGKEINIHRLNEKGYVEIDHALPFSRTWDDSFNNKVLVLASENQNKGNQTPYEWLQGKINSERWKNFVALVLGSQCSAAKKQRLLTQVIDDNKFIDRNLNDTRYIARFLSNYIQENLLLVGKNKKNVFTPNGQITALLRSRWGLIKVRENNDRHHALDAIVVACATPSMQQKITRFIRFKEVHPYKIENRYEMVDQESGEIISPHFPEPWAYFRQEVNIRVFDNHPDTVLKEMLPDRPQANHQFVQPLFVSRAPTRKMSGQGHMETIKSAKRLAEGISVLRIPLTQLKPNLLENMVNKEREPALYVGLKARLAEFNQDPAKAFATPFYKQGGQQVKAIRVELVQKSGVLVRQGNGVADNAPGSIVRTDVFIKNNKFFLVPIYTWQVAKGILPNKAIVAHKNEDEWEEMDEGAKFKFSIFPNDLIELRTKTECFLGYYIGPDRHNGSISLREHDSEISKGNAGVYRVGVKLALSLEKYHIDELGKNRRICRPHQRRPVR

SEQ ID NO: 1124 - protein, 1056 aa, Pasteurella multocida
MQTTNLSYILGLDLGIASVGWAVVEINENEDPIGLIDVGVRIFERAEVPKTGESLALSRRLARSTRRLIRRRARRLLLAKRFLKREGILSTTDLEKGLPNQAWELRVAGLERRLSAIEWGAVLLHLIKHRGYLSKRKNESQTNNKELGALLSGVAQNHQLLQSDDYRTPAELALKKFAKEEGHIRNQRGAYTHTFNRLDLLAELNLLFAQQHQFGNPHCKEHIQQYMTELLMWQKPALSGEAILKMLGKCTHEKNEFKAAKHTYSAERFVWLTKLNNLRILEDGAERALNEEERQLLINHPYEKSKLTYAQVRKLLGLSEQAIFKHLRYSKENAESATFMELKAWHAIRKALENQGLKDTWQDLAKKPDLLDEIGTAFSLYKTDEDIQQYLTNKVPNSVINALLVFLNFDKFIELALKSLRKILPLMEQGKRYDQACREIYGHHYGEANQKTSQLLPAIPAQEIRNPVVLRTLSQARKVINAIIRQYGSPARVHIETGRELGKSFKERREIQKQQEDNRTKRESAVQKFKELFSDFSSEPKSKDILKFRLYEQQHGKCLYSGKEINIHRLNEKGYVEIDHALPFSRTWDDSFNNKVLVLASENQNKGNQTPYEWLQGKINSERWKNFVALVLGSQCSAAKKQRLLTQVIDDNKFIDRNLNDTRYIARFLSNYIQENLLLVGKNKKNVFTPNGQITALLRSRWGLIKIRENNDRHHALDAIVVACATPSMQQKITRFIRFKEVHPYKIENRYEMVDQESGEIISPHFPEPWAYFRQEVNIRVFDNHPDTVLKEMLPDRPQANHQFVQPLFVSRAPTRKMSGQGHMETIKSAKRLAEGISVLRIPLTQLKPNLLENMVNKEREPALYAGLKARLAEFNQDPAKAFTTPFYKQGGQQVKAIRVEQVQKSGVLVRENNGVADNASIVRTDVFIKNNKFFLVPIYTWQVAKGILPNKAIVAHKNEDEWEEMDEGAKFKFSLFPNDLVELKTKKEYFFGYYIGLDRATGNISLKEHDGEISKGKDGVYRVGVKLALSFEKYQVDELGKNRQICRPQQRQPVR

SEQ ID NO: 1125 - protein, 134 aa, Pasteurella multocida
MVNKEREPALYAGLKARLAEFNQDPAKAFTTPFYKQGGQQVKAIRVEQVQKSGVLVRENNGVADNASIVRTDVFIKNNKFFLVPIYTWQVAKGILPNKAIVAHKNEDEWEEMDEGAKFKFSLFPNDLVELKTKK

SEQ ID NO: 1126 - protein, 53 aa, Pasteurella multocida
YSKENAESATFMELKAWHAIRKALENQGLKDTWQDLAKKPDLLDEIGTAFSLL

SEQ ID NO: 1127 - protein, 1366 aa, Pediococcus acidilactici
MGDRKYNLGLDIGTSSIGFAAVDENNQPIRVKGKTAIGVRLFEEGKTAADRRGFRTTRRRLSRRRWRINLLNEIFDAHLAEVDPTFLARLKESNRSNLDPKKSFQGSLLFPERKDYQFYEEYPTIYHLRKALMEEDRKFDIREIYLAVHHIIKYRGNFLNGTPMRSFKVENIELDTLFDQLNQLYAEIVPDNELAFDLAQVADVKDVLSSTTIYKMDKKKQLVKMMLLPASNKALQSENKKIVTQFVNAILNYKFKLDVLLQVETDADWSLKLNDEGADDKLEEFTGDLDENRLEIIDLLQRLHNWFSLNEITKDGNSLSAAMVEKYENHHHHLGLLKKVIENHPDAKKAKALKETYTAYVGKTDDKTQNQDDFYKAVEKNLDDSPDAKEIKRLIQLDQFMPKQRTGQNGAIPHQLHQQELDQIIEKQSKYYPFLAEPNPNVKRRKDAPYKLDELIAFKIPYYVGPLVTPEEQAQNKENVFAWMKRKAAGPITPWNFDEKVDRMESANRFIRRMTTKDTYLFGEDVLPAESMIYQKFVVLNELNNLKINGRHLSLKDKQDVYNDLFKQQKTVSIKALQNYYVTKKKAATAPTVGGLADPKKFLSSLSTYIDFKNMFGERVNDPQFQEDLEQIVEWSTIFEDRGIFKAKLQALGWLSEKQIQQLVAKRYKGWGRLSKKLLTGLKNAEGYSILDEMWRSTENFMQIQTRPEFAALIQQANEKQFEGNDPNNVWENIESILGDAYTSPQNKKAIRQVVKVVQDIEKAVGNPPEKIAIEFTREAAANPQRTQSRLRTLEKLYESAEEVVDAGLTAELAEFKENKHVLSDKYYLYFTQLGRDVYTGDTISLDKLNDYDVDHILPQSFIKDDSLDNRVLTIRAVNNGKSDNVPAKMFGKKMGSFWRYLLDNGMISKRKYNNLITDPDNISKYAQKGFINRQLVETSQVIKLTANILNGIYDKDTEIIEVPAKMNSQMRKMFDLVKVREVNDYHHAFDAYLTIFIGKYLYKCYPKLRPYFVYGKFKKFGDNEDIEVGDGRFNFLNRIERLKNVTDPETGEILWSNVAPNETIKQIKKVYNYKFMLVSRETTTRRAELFNQTVYPKNYRGKLIPIKEDRPTDLYGGYSGNTDAYLAIVALEDKKKGKYFKVVGIPTRAAAKLEKLKQQDSQQYLQALHKVIAPQFTKSTKKGIKKTEFEIVLDKVHYRQLVQDGPVKMMLGSSTYKYNAKQLVLSEKALQVIADDRKFDETQKDDNLIAVYDEILSIVNQSFDLYDINGFRKKLNDNRDQFIDLPAETKYEGRKVVAHGKREMILEILKGLHANAAFGNLKPIGFSTAFGQLQVPNGIILSKNAILIHQSPSGLFERKIKLSDL

SEQ ID NO: 1128 - protein, 1229 aa, Pediococcus acidilactici; identical to SEQ ID NO: 125

SEQ ID NO: 1129 - protein, 270 aa, Pediococcus lolii
LFNQTIYSAKASKTMIPIKNDRPTKLYGGYSGNEDAYMSIIRLSDKKKTYKVVGISMRDASKLKAYENNAHEEYLKKLKEVIEQQFLDSGKKTKADFEIVIPKVNYHQRMQDGTKQFRIGSSKYVHNTKQLVLSEKTLKAIRNNKQYNGDAEKDLINAFDEILTIVNDSFSIFDIRSFRKKLNESRDKFVSLPVEDTKEKSKVIKGKRETLKQILIALHANGTSQDIPQLGLKSFGKMVKTGGLTLSENTALIHQSPSGLFEHKIKLSDL

SEQ ID NO: 1130 - protein, 1016 aa, Pediococcus lolii
MNGIFDAHLAEVDPTFLARLKESNRSNLDPKKSFQGSLLFPERKDYQFYKEYPTIYHLRKALMEKDRKFDIREIYLAVHHIIKYRGNFLNGTPMRSFKVENIELDTLFDRLNQLYEEIIPDNELAFDLEQVADVKEVLSSTTIYKMDKKKQLVKMMLLPASNKALQSENKKIVTQFVNAILNYKFKLDVLLQVETDADWSLKLNDEGADDKLEEFTGDLDENRLEIIDLLQRLHNWFSLNEITKDGNSLSAAMVEKYKDHRHHLELLKKVIEDHSDAKKAKALKETYTAYVGKTDDKTQNKDDFYKAVEKNLDDSPEAKEIKRLIQLDQFMPKQRTGQNGAIPHQLHQQELDQIIEKQSKYYPFLAEPNPNVKRRKDAPYKLDELIAFKIPYYVGPLVTPEEQAQNKENVFAWMKRKAAGPITPWNFDEKVDRMESANRFIRRMTTKDTYLFGEDVLPAESMIYEKFVVLNELNNLKINGRHLSLKDKQDIYNDLFKQQKTVSIKALQNYYVTKKKAATAPTVGGLADPKKFLSSLSTYIDFKNMFGERVNDPQFQEDLEQIVEWSTIFEDRGIFKAKLQALGWLSEKQIQQLVAKRYKGWGRLSKKLLTGLKNAEGYSILDEMWHSTENFMQIQTRPEFAALIQQANEKQFEGNDPDNVWENIENILGDAYTSPQNKKAIRQVVKVVQDIEKAVGNPPEKIAIEFTREAAANPQRTQSRLRTLEKLYESAEEVVDAGLTAELAEFKENKHVLSDKYYLYFTQLGRDVYTGDTISLDRLNDYDVDHILPQSFIKDDSLDNRVLTIRAVNNGKSDNVPAKMFGKKMGSFWRYLLDNGMISKRKYNNLITDPDNISKYAQKGFINRQLVETSQVIKLTANILNGIYDKDTEIIEVPAKMNSQMRKMFDLVKVREVNDYHHAFDAYLTIFIGNYLYKCYPKLRPYFVYDNFKKFGNKEDIGHKRFNFLGKIERDKKVVAPETGEILWSNVAPNETIKQIKKVYDYKFMLTSHETYTKHG

SEQ ID NO: 1131 - protein, 1333 aa, Planococcus antarcticus
MKNYTIGLDIGVASVGWVCIDENYKILNYNNRHAFGVHEFESAESAAGRRLKRGMRRRYNRRKKRLQLLQSLFDSYITDSGFFSKTDSQHFWKNNNEFENRSLTEVLSSLRISSRKYPTIYHLRSDLIESNKKMDLRLVYLALHNLVKYRGHFLQEGNWSEAASAEGMDDQLLELVTRYAELENLSPLDLSESQWKAAETLLLNRNLTKTDQSKELTAMFGKEYEPFCKLVAGLGVSLHQLFPSSEQALAYKETKTKVQLSNENVEEVMELLLEEESALLEAVQPFYQQVVLYELLKGETYVAKAKVSAFKQYQKDMASLKNLLDKTFGEKVYRSYFISDKNSQREYQKSHKVEVLCKLDQFNKEAKFAETFYKDLKKLLEDKSKTSIGTTEKDEMLRIIKAIDSNQFLQKQKGIQNAAIPHQNSLYEAEKILRNQQAHYPFITTEWIEKVKQILAFRIPYYIGPLVKDTTQSPFSWVERKGDAPITPWNFDEQIDKAASAEAFISRMRKTCTYLKGQEVLPKSSLTYERFEVLNELNGIQLRTTGAESDFRHRLSYEMKCWIIDNVFKQYKTVSTKRLLQELKKSPYADELYDEHTGEIKEVFGTQKENAFATSLSGYISMKSILGAVVDDNPAMTEELIYWIAVFEDREILHLKIQEKYPSITDVQRQKLALVKLPGWGRFSRLLIDGLPLDEQGQSVLDHMEQYSSVFMEVLKNKGFGLEKKIQKMNQHQVDGTKKIRYEDIEELAGSPALKRGIWRSVKIVEELVSIFGEPANIVLEVAREDGEKKRTKSRKDQWEELTKTTLKNDPDLKSFIGEIKSQGDQRFNEQRFWLYVTQQGKCLYTGKALDIQNLSMYEVDHILPQNFVKDDSLDNLALVMPEANQRKNQVGQNKMPLEIIEANQQYAMRTLWERLHELKLISSGKLGRLKKPSFDEVDKDKFIARQLVETRQIIKHVRDLLDERFSKSDIHLVKAGIVSKFRRFSEIPKIRDYNNKHHAMDALFAAALIQSILGKYGKNFLAFDLSKKDRQKQWRSVKGSNKEFFLFKNFGNLRLQSPVTGEEVSGVEYMKHVYFELPWQTTKMTQTGDGMFYKESIFSPKVKQAKYVSPKTEKFVHDEVKNHSICLVEFTFMKKEKEVQETKFIDLKVIEHHQFLKEPESQLAKFLAEKETNSPIIHARIIRTIPKYQKIWIEHFPYYFISTRELHNARQFEISYELMEKVKQLSERSSVEELKIVFGLLIDQMNDNYPIYTKSSIQDRVQKFVDTQLYDFKSFEIGFEELKKAVAANAQRSDTFGSRISKKPKPEEVAIGYESITGLKYRKPRSVVGTKR

SEQ ID NO: 1132 - protein, 211 aa, Porphyromonas catoniae
MGKKVLGLDLGVGSIGWCLITLDKDEKPQSILGMGSRIVPLSADDATEFTQGKAITKNKMRTVARTIRKGMDRYQLRREALKKVLREHAMLPDEALIKLPLLELWELRARAATPGEQVSLTELGRVLLHINQKRGYKHAKADEAAEAETKKGKETGYVAQVKGRYQILKEKGLTIGQHFAGELRANQQTAPRGTYYTYRIKEQVYPRVRGV

SEQ ID NO: 1133 - protein, 1009 aa, Porphyromonas catoniae
MRIIREAYIEEYDRIMAVQRVFYPELLTDALIGRIRDRIIFYQRPLKSCKQLVSFCEFEKKEKVIRVKHTNKEGVQELVEKTITIGPKVAPKSSPIFQVCKVWESIHNIRLYHPDGTERKLEQEEKQKLFDYLQRNDKLSLTTLRKELKIKPKDKLWCDKLLEKGIAGNTTAAILRKAFKGYEHYERLFRFDLVRRDSHEADEDGVIRPIIDESYQNEPLYKLWHILYSIEDRAEMRSALIGQLGIKAEDLDNGLMDALYKIDFVKQGYGNKSAKFICKLLPHLQEGKMYSEAAEAAGMRHSDSMTAQERDERNLLEEIPLLQKNALRQPVVEKVLNQMINLVNALKREHGEIDEVRVELARELKMSREEREKATKNNSSREKENKAIAERITEYGLTPTKSRIQKYRLWQESAESCIYCGKRVDVVQFLRGEETEVEHIIPKSILFDDSLSNKACACRSCNQEKGNRFAMEYIQAKGWEQDYIERVDSLFHDKKISYSKRQHLLMLPKDLPEDFIERHLRLSQYISREAQGILRKGIRLVSASEGGVTAKLRQLWGYDNILRDLNLERYKSMGETEVVTVEHRDGQRTDERIKDWSKRKDHRHHAIDALVVACTRQSYIQRLNRVNAEADRQEMDAFIKEQQQEHKLSKKEKLSLLENWLKEQPHFTTGEVKEHAEGILISFRPGKRTVSRGRNIYKRSGKTDVQRNVLIPRGALSEETVYGVISVDGENKVVCKYPLQKFLDTKETNVDKIADQAAEKIVDKVLREKIRERIKRYGKKEAFAEPLYLDEAQTQVVRSVRCFISKDQAKLIPLRYNDESEAVGFVAPGNNHHLALYRDASGKMRASVVSFFAAVERARYGIPMIVLNPRETREKARIIPDLPESIFSKLPEEDWVLEETLQEGEMVLLGMENDAIEEAIKKKDYSKLSRYLYRVQSLSYNDYKFCFHLETESEKKEKKKGEDKKRGEKAKNTAVMPPKRYRIRCLATYQEDLNPRKVKIDLLGRISLA

SEQ ID NO: 1134 - protein, 1197 aa, Porphyromonas sp.
MLMSKHVLGLDLGVGSIGWCLIALDAQGDPAEILGMGSRVVPLNNATKAIEAFNAGAAFTASQERTARRTMRRGFARYQLRRYRLRRELEKVGMLPDAALIQLPLLELWELRERAATAGRRLTLPELGRVLCHINQKRGYRHVKSDAAAIVGDEGEKKKDSNSAYLAGIRANDEKLQAEHKTVGQYFAEQLRQNQSESPTGGISYRIKDQIFSRQCYIDEYDQIMAVQRVHYPDILTDEFIRMLRDEVIFMQRPLKSCKHLVSLCEFEKQERVMRVQQDDGKGGWQLVERRVKFGPKVAPKSSPLFQLCCIYEAVNNIRLTRPNGSPCDITPEERAKIVAHLQSSASLSFAALKKLLKEKALIADQLTSKSGLKGNSTRVALASALQPYPQYHHLLDMELETRMMTVQLTDEETGEVTEREVAVVTDSYVRKPLYRLWHILYSIEEREAMRRALITQLGMKEEDLDGGLLDQLYRLDFVKPGYGNKSAKFICKLLPQLQQGLGYSEACAAVGYRHSNSPTSEEITERTLLEKIPLLQRNELRQPLVEKILNQMINLVNALKAEYGIDEVRVELARELKMSREERERMARNNKDREERNKGVAAKIRECGLYPTKPRIQKYMLWKEAGRQCLYCGRSIEEEQCLREGGMEVEHIIPKSVLYDDSYGNKTCACRRCNKEKGNRTALEYIRAKGREAEYMKRINDLLKEKKISYSKHQRLRWLKEDIPSDFLERQLRLTQYISRQAMAILQQGIRRVSASEGGVTARLRSLWGYGKILHTLNLDRYDSMGETERVSREGEATEELHITNWSKRMDHRHHAIDALVVACTRQSYIQRLNRLSSEFGREDKKKEDQEAQEQQATETGRLSNLERWLTQRPHFSVRTVSDKVAEILISYRPGQRVVTRGRNIYRKKMADGREVSCVQRGVLVPRGELMEASFYGKILSQGRVRIVKRYPLHDLKGEVVDPHLRELITTYNQELKSREKGAPIPPLCLDKDKKQEVRSVRCYAKTLSLDKAIPMCFDEKGEPTAFVKSASNHHLALYRTPKGKLVESIVTFWDAVDRARYGIPLVITHPREVMEQVLQRGDIPEQVLSLLPPSDWVFVDSLQQDEMVVIGLSDEELQRALEAQNYRKISEHLYRVQKMSSSYYVFRYHLETSVADDKNTSGRIPKFHRVQSLKAYEERNIRKVRVDLLGRISLL

SEQ ID NO: 1135 - protein, 1422 aa, Prevotella denticola
MTQKVLGLDLGTNSIGSSVRNLDLSDDLKGQLEFFSSDIFRSSVNKESNGREYSLAAQRSAHSRSRGLNEARRRKLWATLDLLIKYGFCPMSPESLMRWRTYDKQRGLFREYPIDDKNFNAWILLDFDGDGKPDYSSPYQLRRELVIRQFDFDQPIERYKLGRALYHIAQHRGFKSSKGETLSQQETNSKQSLTDDTADVAGEMKASEEKLSKGLSTYMKENNLLTVGAAFAQLEDEGVRVRNNNDYRAIRSQFQREIETIFKFQQGLSVENELYERLVSEKKNIGTIFYKRPLRSQRGNVGKCTLERTKPRCAIGHPLFEKFRAWTLINNIKVRMSEEEQAEQLPMKLRFELYNDCFLAFVRAEFKFEDIRKYLEKRLGVHFSYNDKTINYKDSTSVAGCPITARFRKLLGEDWESFHVDGQKQRQAHGKNNASFHTVSYSTNDIWHFCYDAEEPEAVLSFAQDNLKWEKKKAEELVRIWSAIPQGYAMLSQKAIRNINKMLILGLKYSDAVLLAKVPEIVEITDGEILSVTEDYHRVEAQVGYEKQINNIVNALIAKYKSASEEYRFADHNYEYQLDKSDEKDIIKQIESNIGTRKWSLLDADEQTDILQKVRDKYQNFFRSHERKFVESPKLGECFEEYLMKKFPMVEGERWKKLYHPSQIAIYRPVPANKDRSALRLGNPDIGAIKNPTVLRVLNTLRKRVNQLLDDGIISPDETRVVVETARELNDANRKWALDTYNRIRHDENEKIKKILAEFYPKRDNISTVDIDKARYVIDQREMDYFTEAKTYHKDIKKYKLWLEQGGQCMYTGRTINLSNLFDPNSFDVEHTIPESISFDSSDMNLTLCDAHYNRFIKKNHIPADLPNYDKSVVIDGKEYSPIKPRLQRWADRVERLNRNVEYWRGQARRAQNKDRKDQCMREMHLWKMELEYWTKKLERFTITEVTDEFKNSQLVDTRVITRHAVLYLKSIFPHVDVQRGDVTAKFRKILGIQSVDEKKDRSLHSHHAIDATTLTIIPGAAKRERMLELFAKIEEVNKMLSFSGNEDRTGLKQELDGLKNQLNKEVKACRIGHNVSEIGTFINDNIIINHHVKNQALTPVRRRLRKRGHIVGGMDNPRWQTGDALRGEIHKASYYGAITQYAKDKEGKVLMKEGRPQINPTIKFVIRRELKYKKSSTDSGFASWDDLGKAIVDKELFALMKGQFPEGTSFKDACEQGIYMIKKGKNGEVDTKLYRIRHIRCKTKQKNALKIKEQAYKSEKEYKRYFYAAVGDLYAMCCYTNGKTREFKIYSLYDISCHRKVGVEDIPEFITDKKGNRLMLDYKLHTGDMILLYKENPEELYDLDNVSLSKLLYKINGFENDGLRIRMVNHLVAKEAMGESVKDYAKLPDIIRCGVKTIKFLVMGENRDFVIKNGKISFNHR

SEQ ID NO: 1136 - protein, 443 aa, Prevotella disiens
MELDYWKGKYNRFTMTEIPEGFSRRQGMGIGLISRYAGLYLKTIFHKKDNPQKSNVYIVKGSITAEFRRIWNIQDDYEKKCRDNHIHHCIDAIVVGCIGKREYDLMAQFYRDEEKYRWEKKKKPFFKKPWETFTQDMLSLKDEVLTVHFNPSNFTKKAHKKVFTPKGIFVAQGDCARVKLHKESYFGAIEQKGEIKYVMRKELSALKIEDIKNIVDAVVKEKVLAVVKKKGFKQAMAEPIYMNEDKRILIKKVRLFVSQTNPLIVKKHRDLSSKEYKQNYYVDNEGNLMIAMYEGVKKNGKIDREITVVNNLEAAKFFRQSQKNNAEKQLISHLSPKNGYPLKTVLTQKQLVLMYEDSPKEIKLRDTKNMVKRLYQVVEIEKDGRVKLKFHQEARSEGLNKNSAAFKIQDTPESLYRHTKSNLKVLVNGVDFKINILGEISLI

SEQ ID NO: 1137 - protein, 1375 aa, Prevotella histicola
MKKILGLDLGTTSIGWALVYESENTDEKSSIVRLGVRVNPLSVDEKGNFEKGKAITTNADRQQTHGARINLQRYKLRRENLKDCLQKQGWIGTEALCEEGKTSTFETYMLRAKAAEEEISLHELCRVLFMMNKKRGYKSNRKANNKEDGKLFDGMTVAKKLYEEHLTPAEYSFQLLSSGKKFKQEYYRSDLKEEFDRIWNEQQKYYPEILTDDFKQQLQGKSKGNTSKIFLGKYGIYSADLKGLDRKLQPLKWRVEALKQQVDKEVLAFVISDLNGQIASTSGLLGAISDRSKELYFNKQTVGQYLWTSLKETPHVSIKNKPFYRQDYLDEFEKIWETQATYHKELTPELKQEIRDIIIFYQRPLKSKKGLISVCELEQRKVKVTIDGKEKEISIGPKVAPKSSPMFQEFRIWQNLNNILLIDKGNNSIHPLYEEEKNLLYEELSVKEKLSKAEALKVLNKNSKQWDLNYKEIEGNRTQAVLYDCYNRIIVMTGHEEYNFKKLKASEIRSYVKTTFTGLGFNTDILEFDSSLTGHELEKQPMYQLWHLLYSYESDNSRTGNDALLRKLETAFGFPKEYAAVLSDVVFEDSYGNLSVKAMRKILPHLQAGLNYSQACEEAGYKHSRRSLTKNELDQKEYKEKLELLPKNSLHNPVVEKILNQMINVINAVIDEYGKPDEIRIELARELKIGAAERENMTRSINQGNAENKRIREILEKEFALSYISRNDIIKYKLYEELKSNGFKTLYSDTYISKDKLFSKDFDIEHIIPKARLFDDSLSNKTIEARDVNIAKSNKTAFDFISEKYDQQGIEAYKKKLDILLQDGSISKAKYNRLLMKEADIPSGFIDRDLRDTQYIAKKAYEILSDLVRNVTPTTGAVTSRLREDWQLVDVMKELNFEKYQKLGLVEVIEDRDGRKIKRIKDWTKRNDHRHHAMDALTIAFTKPSYIQYLNNLNARSDKNSSIYGIENKELHREDNKLRFNAPLPINEFRAEARRHLKSILVSVKAKNKVMTQNVNVIKTKHGVIKKVQLTPRGELHNATFYGTKKRPIIKMVKVGAALDEVTIKKVSSSFIREALLDRLHEYNGDAKKAFTGRNSIDKNPIYIDEEHKKTVPALVKTIEWEMYHPTRKLISPDLKIDKVIDKGIREILKTRLAKFNGDAQKAFSNLDENPIYKDEAKKITLKRVSLEGVSSVIPLHTLKDREGKLVVGKDGKPVLGDYVQTSNNHHIAFYMDENGNLQDNVVSFFEAAERKSQGVPVIDKNYNHDKGWNFLFTMKQNEYFVFPNEVTGFNPSEVDLMDEANYSIISPNLYRVQKMSKASGRDYWFRHHLEAMLNDDPKLRNSMFKRITSLKALEGIVKVRINCIGKIVAVGEYD

SEQ ID NO: 1138 - protein, 1380 aa, Prevotella intermedia
MKRILGLDLGTTSIGWALVNEAENNNEASSIVRLGVRVNPLTVDEKSNFEKGKAITTNADRQLRHGARINLQRYKLRRQNLHDCLQKQGWLGTEAMYEEGKASTFETYKLRAKAAEEEISLHEFARVLFMLNKKRGYKSNRKANNKEDGQLFDGMTIAKKLYEEHLTPAEYSLQLLNKGKKFTQGYYRSDLNAELERIWDEQKKYYPEILTDEFKQQLEGKTKTNTSKIFLAKYGIYSADLKGLDRKFQPLKWRVEALQQQVDKEVLAFVISDLKGQIANTSGLLGAISDRSKELYFNKQTVGQYLWASLEENPHISIKNKPFYRQDYLDEFEKIWETQAAFHKQLTPELKQEIRDIIIFYQRPLKSKKSLISVCELEQRKVKATIDGKEKEITIGPKVAPKSSPVFQEFRIWQNLNNVLLIDNDTNEKRPLDEVERNLLYKELSIKAKLSKTEALKILNKKGKQWDLNYRELEGNRTQAILFDCYNRIITLTGHEECDFKKIKASEIRHYVSTIFKNLGFSTEILDFDPSLKKHELEKQPMYQLWHLLYSYESDNSRTGNESLLRKLETTFGFPEEYATVLCDVVFEEDYGNLSVKAMREILPYLQAGNDYSQACAYAGYNHSRHSLTKEELDQKVYKERLELLPKNSLRNPVVEKILNQMINVINAIIDEYGKPDEIRIEMARELKSSAADRKKTTHAISQGNAENQRIREILEKEFSLSYISRNDIIKYKLYEELEPNYYKTLYSDTYITKDKLFSKDFDIEHIIPKARLFDDSFSNKTLEARNINLEKSNKTAFDFIKEKYGEDGAEAYKKKLDMLLENDAISRPKYNNLLRAEADIPSDFINRDLRNTQYIAKKACEILGELVKTVTPTTGKITNRLREDWQLVDVMKELNFEKYEKLGLTEIVEDRDGRKIKRIKDWTKRNDHRHHAMDALAIAFTKPSFIQYLNNLNARSNKGDSIYAIENKELHYEEGKLRFNAPIPVNEFRAEAKRHLSAILVSIKAKNKVMTQNVNKIKTKHGIIKKIQLTPRGPLHNETIYGTKMRPIIKMVKVGAALDEATINKVSSPAIREALLKRLNEYSGNAKKAFTGKNTLEKNPIYLNAGRTKTVPSLVKTVEWESFHPTRKLIDKDLNVDKVVDKGIREILKARLEEFNGDAKKAFSNLEENPIYLDEAKKIALKRVSIEGVLSAIPLHTLKNQAGKPITGKDGKPVLGNYVQTSNNHHIAFYYDEDGNLQDNAVSFFEAAERKSQGIPVIDKDYNRDKGWRFLFTMKQNEYFVFPNEATGFIPSEVDLTDEANYGIISPNLYRVQKVSRIDKGTSASRDYWFRHHLETILNDDAKLKNLAFKRIRGLLELKDIIKVRINSTGKIVAVGEYD

SEQ ID NO: 1139 - protein, 129 aa, Prevotella multiformis
MQKGGTGCKINRQTVGNVEVNVLNLRLYDRTDDREVTAGYLPTKEDYVRLFVYLNDRKEINQDTLLKDYFRLKKVKCGNEKEFAIRWNYIEDKEKKYPCNETRHELLAALDRAGMEHGWLDDSGTSARW

SEQ ID NO: 1140 - protein, 535 aa, Prevotella multiformis
MVKGLLSNIVRTAEEREETSKFVISCTGRITDRLKQDWGLNDVWNSLVYTRFKRLNELTETEAFGHWQDKDRRVFQTSVPLELQRGFSKKRIDHRHHAMDALVIACASRNIIGYLNNESAESPEKREDLRRKLCDKNHIIRKPWESFTQDARAALEDIVVSFKNYVRIINKATNYYERYDADGRKTKAEQKGGEMWAVRKPMHEATYYGKVNLRRKERVSLKAALEDIPSICNRDLRDYINGLVEKHFNKEQVLAQFRSVGNRWNKQHIDKVDVWRFSDGKEEMVATRKPLDTSFDAKRIEAVTDTGIQRILSNYLEAKGGDPKIAFTPEGIADMNQHITAYNNGKQHKPILKVRVSTKLGKKYPVGQTGCKAGQFVVAEAGTNLYFAVYEDGEGNRSYDTIPLNEAVECLKQGLPPVPETREKGDRLKFYLSPNDLVYVPAGDEENEIDRERIYKFVDSSGTTANFIPHRTAGLIYNVDKKLAEALCNGSIIQNEYGVGSQQSKNQKALTGEMVKAVCWKLEVDRLGNILRIIK

SEQ ID NO: 1141 - protein, 1380 aa, Prevotella nigrescens
MKRILGLDLGTTSIGWALVNEAESNNEASSIVRLGVRVNPLTVDEKSNFEKGKAITTNADRQLRHGARINLQRYKLRRQNLHDCLQKQGWLGTEAMYEEGKASTFETYKLRAKAAEEEISLHEFARVLFMLNKKRGYKSNRKANNKEDGQLFDGMTIAKKLYEEHLTPAEYSLQLLNKGKKFTQGYYRSDLNAELERIWDEQKKYYPEILTDEFKQQLEGKTKTNTSKIFLAKYGIYSADLKGLDRKLQPLKWRVEALKQQVDKEVLAFVISDLKGQIANTSGLLGAISDRSKELYFNKQTVGQYLWASLEENPHISIKNKPFYRQDYLDEFEKIWETQATFHKQLTPELKQEIRDIIIFYQRPLKSKKSLISVCELEQRKVKATIDGKEKEITIGPKVAPKSSPVFQEFRIWQNLNNVLLIDNDTNEKRPLDEDERYLLYKELSIKAKLSKTEALKILNKKGKQWDLNYKELEGNRTQAILFDCYNRIITLTGHEECDFKKIKASEIRHYVSTIFKNLGFSTEILDFDPSLEKHELEKQPMYQLWHLLYSYESDNSRTGNESLLRKLETTFGFPEEYATVLCDVVFEEDYGNLSVKAMRKILPYLQAGNDYSQACAYAGYNHSRHSLTKEELDQKVYKERLELLPKNSLRNPVVEKILNQMINVINAIIDEYGKPDEIRIEMARELKSSAADRKKTTHAINQGNDENQCIREILEKEFALSYISRNDIIKYKLYEELKPNGFKTLYSDTYIPKDKLFSKDFDIEHIIPKARLFDDSYSNKTLEARDINLAKSNKTAFDFVKEKYGEQGAEAYKKKLDMLLGNNVISKPKYNKLLMTEADIPSDFINRDLRNTQYIARKACEILGELVRTVTPTTGKITNRLREDWQLVDVMKELNFEKYEKLGLTEIVEDRDGRKIKRIKDWTKRNDHRHHAMDALAIAFTKPSYIQYLNNLNARSNKGDSIYAIENKELHYEEGKLRFNAPIPVNVFRAEAKRHLSAILVSIKAKNKVMTQNVNKIKTKHGIIKKIQLTPRGPLHNETIYGTKMRPIIKKVKVGAALDEATINKVSSPAIREVLLKRLNEYSGNAKKAFTGKNTLDKNPIYLNAERTKTVPASVKTVEWENYHPIRKPITPDLKVDKVIDKGIGEILKARLEEFNGDAKKAFSNLEENPIYLDQTKKIALKRVSIEGVLSTIPLHTLKNQAGKPIMGKDGKPVLGNYVQTSNNHHIAFYYDEDGNLQDNAVSFFEAAERKSQGISVIDKDYNRDKGWRFLFTMKQNEYFVFPNEATGFIPSEVDLTDEANYGIISPNLYRVQKMSRIEKGTSVSRDYWFRHHLETILNDDSRLKNSAFKRINSLKPLEGIIKVRINSIGKIVAVGEYD

SEQ ID NO: 1142 - protein, 1506 aa, Prevotella nigrescens
MKTILGLDLGPNSIGWAKVEVDDEGNYLRNIKLGSRIIPMTQDMLGDFDKGVKVSQTAIRTDFRGNRRLIERHLLRRERLHRVLHALKFLPKHYEDAIGWDRNEPATYGKFVNNSEPKLAWERQEDGSMRFLFMESFNEMVADFAQNQPSLVSDGKKIPLDWTIYYLRKKALTRPIKKEELAWILLNFNQKRGYYQLRGEEEEDNLTKRKEYYKLKVVGVEADGAPKGGKTWYNIHLENGWTARCQSKIPLDDWVGKVKEYIVTTEYEDDGKTPKCDKEGKVKRSFKSPEKDDWQLIKTRTEKFIDDSNKTVGAFIYDYLLEKPFDKIRGKYIRTIERKYYKNELREILREQTKYHEGLHSLEALKICAEELYKNNQQHQEYLLKKDMTFLLLNDLIFYQRPLKSKKSLIADCPYEVYKYDDKLTGKKGQKKIKCIAKSNPYYQEFRLWQFIANLRLFSVTDGKEVTAEYLKTEEDYVRLFSFLNDRKDIKQETFLRSFLKLKKESIGSEKIYPIRWNYIEDANKSYPCNATRHELLLAFDRADIPRELLDVEEREYRLWHLLYSIEAKEETESALRKLKANKAFGDLNIDDAFVNSFLKIKPFEKEYGAYSEKAIKKLLAVMRRGSLWKEADICEATKQNIAKILQNDIDEKLKKKIEAAVSSFNKLSDFQGLPTWLACYVVYGRHSEAAQIQCWQSPEDLKTYINKFKQHSLRNPIVEQCLLETLRTVYDIWKDAGQIDEIHIELGRNMKSTAEQRARKTKDILRNENTNLRIKNLLVELKNDDKIENVRPYSPSQQEILRIYEEGALQELSKEDEMFEDISKISKMAQPSPTELSRYKLWLEQKYRSPYTGRVIPLSKLFTTAYQIEHIIPQSRYFDDSFNNKVICESEVNSLKDNMLGYEFIKECGGRIVHCTLLGDVKIFTKEEYKDFVTKHYIDNTYKRDKLLLEDIPQEFSARQLNDSRYISKMVQTVLSNIVRAENEQEATSKFVVSCNGAITNRLKKDWGLNDVWSSIVCPRFKRLNEITKTNAFGHWEDKAGKHVFQTTVPLELQRGFSKKRIDHRHHAMDALVIACASRNIVNYLNNESANSPEKREDLRKKLCDEKRKIRKPWKTFTQDAREALSDVVVSFKNYVRVINKATNYYEHYSSSGNKVMISQKGNDMWAIRKPLHKESVFGRVNLCRKVIVSLKKALENIPAICDKTLRDYINALVEKHFNTRQLLAHFKSINYRLNRQCVEKVEVWQFSDEKIEMVARRKSLDTSFDDKQISSITDTGIQKILLNYLQTKDGNAEIAFTPEGIEEMNKNISLYNDGKAHQPILKVRVATPKGMKYPVGQTGNKATKFVVAEKGTNLYFAIYENELGVRSYDTIPLNIVVERLKEGLSPVPQANEADIPLKFYLSPNDLVYVPTKENEDELCRDRIYKFVDSSGTTANFVPHTSANTIYNVDKEYAEKCCNGAVFLNEYGLGSPQSKNQRALTGEMIKEICWKLKVDRLGNIIKVIK

SEQ ID NO: 1143 - protein, 774 aa, Prevotella oulorum
MEQCILETLRTVYDIWKEAGQIDEIHVELGREMKQTAEQRAHLTEKVLRNENTNLRIKSLLMELKNDADMKDVRPYSPMQQEILRIYEEGALQTLSKDDAAFTEIMKISKMAQPSASELQRYRLWLEQKYRSPYTGKPISLSKLFTSAYQIEHIIPKKRYFDDSFSNKVICEAEVNGKKDSMLAYEFIKDCGGDVIHCTTLGDVTILSEAEYKALVTELYANNKSKKDKLLMEDIPQDFINRQLNDSRYISRVVMTLLSNIVRIEGEEEATSKFVIPCSGGITDKLKKDWGLNDVWNNIVYPRFERLNALTNTSDFGQWENKEGKRVFQTSVPLELQRGYQKKRIDHRHHAMDALVIACASRKIINYLNNQEANDPTKQENARKQLCIKSRIIRKPWETFTQDAYKALDNIVVSFKNYVRVINKATNYYERYNADGKKAVDEQKGEAMWAIRKPMHKDTVFGHVNLRRKAVVKLKDALENIPAICDKTLRHYIQDLQKKHFNTKQLLAHFKSINYRLNKQAVDKVEVWQYSDDKEQLAATRKPLGPSFDAKCIAAITDTGIQKILLNYLQAKGGDPAIAFTPEGIAEMNQNIAVYNGGKQHQPILKVRIAKPMGKKFPIGQTGNKAFQYVIAEEGTNLYFAIYEDEEGNRTYDTIALREVVERLKQGLTPVPEKNEKGVALKFHLSPNDLVYVPTADELLSKVCSLDKNRIYKMVSATKSECLFIPHSVAKTIYDKVEFEALNKMGRALTGEMIKSVCWKIEVDRLGHIVNIIK

SEQ ID NO: 1144 - protein, 691 aa, Prevotella oulorum
MKTILGLDLGTNSIGWAKVIVDDNENYLRDIQLGSRIIPMSQDVLGKFDKGVTESQTAIRTSFRGVRRLRERTLQRRERLHRVLHTLHYLPPHYDSAIGWDRKTPTTYGKFLNHGEPKLAWERREDGTMQFLFMDAFHEMIADFAKYQPALVADGKKVPLDWTIYYLRKKALTQPIKKEELAWILLNFNQKRGYYQLRGEEDEENAAKHEEYHELKVVGVEVDEAGKGDNTWYNVKLENGWTYHRQSKIPLDDWVGKVRAFIVTTEYEKDGTTPKKDKEGNVKRSFRSPDEKDWGLRKKQTEHSLEASGTPVGAFIYDHLLKEPSDKIRGKFIHTIERKYYKQELAAILREQSKHHEKLCSKDMLKACIEELYPNNPLHRESLLKKDMPYLLIEDLIFYQRPLKSKKSLIAECPYEAYSYVDKETGEMKRQGIKCIAKSNPYYQEFRLWQLIANLRLRNRSDERDVTAEYLPHQEDYVRLFTYLNDRKEINQETLLKDFFKLKKVTIGGEKVFPIRWDYIEDKEKKYPCNATRHELLLALDRAGIEHDWLNDRDLAYRLWHLLYSVDSKDETERALRKLKDDDAFVESFLKIKPFEKEYGAYSEKAIKKLLPVMRRGSLWNEADLCPSTKERIANILQGTIDEKLKKKIGAFISSCQQVSDFQGLPEWLACYVVYGRHSEATDIQRWETPE

SEQ ID NO: 1145 - protein, 242 aa, Prevotella saccharolytica
MKLVLGLDLGVGSVGWALIFITDSGEPIKILALGERIVSMDSNNSNEFSAGATCTLNQKKTKAKSVRKGYSRYVQRRDALTAELRHIGMMPDETLIKLPVLDLWQLRANAATEGKKLSLAEIGRVLYHINQRRGYKHGKSDVSSDNKQKGYVKAVNERYCMIQERQQTIGQYFALKLKETAVTTEKGTFYTFRIKDQVFPREAYEEEFVVAYSTKVLKFKQITTLLNVVICLMMLLLIVQRY

SEQ ID NO: 1146 - protein, 1174 aa, Prevotella sp.
MEFHPELCDAELLKACAEELYRNNEAHRAQLLAKDFKHLLVEDVLFYQRPLKSKKSLIANCPYETRQYINKETGEIKDVNVKCIAKSNPYFQEFRLWQWISNLRLLRQADGQDVTAAYIKGNEDKERLFDLLNNQGEIKQEHILRDFLKLKKPKGGEFPLRWNYVDDKIYPANETRHAINKAIKGMAVDKEEKETLGQLLDQPAVAYMLWNLLYSITDRNELARALRRFALTHGVSSVDAFVESFLKVKPFKKEYGAYSEKATKKLLQVMRLGKYWCGDELPEPAKRTKGNKQAVYDEMAHRGICKQTLQNISNIIEENIDERLMGALLNPERPLTELSHFQGLSVSDACYVVYGRHSEVAEIVKWKDADELNTFINNFKQHSMRNPIVEQCVLETLRTVRDVWEQEGQIDEIHVELGRNMKRTAEQRARDTQAIQRNENTNMRISLLLTELKNDPSISDVRPYSPSQRELLKIYEEGALENLTNQDEDIAKISRLAQPSASELRRYKLWLDQKYVSPYTGRPIPLAKLFTPAYEIEHIIPQSRYFDNSFSNKVICEAEVNKLKDNLLGMEFIKKFGGKTKGILDEEAYKLHVTTNYAHNPAKRSKLLMEDLPTDFNSRQLNDTRYISKTVMALLSNVVREEGERETRSKHVVVCTGGVTDTLKKDWGLHDVWHNLVYPRFIRLNNLTGSQNFGYWRYLNEENSKKGEDSKKVFQITLPPECQRGFVKKRIDHRHHAMDALVIACASANIVNYLNNQSAANPHIHENLQRLLCDRKREIRKPWPTFTQDAQAALKDLVVSFKNTVRVVNKASNTYLRYDKDGKKKRFKQEGEGLKAIRKPMHKETYYGEVNLIRKEMVPLKRALDDVNAIVDKELRASIKGLLRDGFNPQQVLANFKAKDFKFDKRDIKKVEVYVSSEKSTPMVATRKSLDTSFNAKRIADITDTGIQKILLNYLKANDNSPEQAFTPEGIAYLNEHIAEYNDGKPHQPILKVRVSEVKGAKFAVGQTGSKKDKFVEAQSGTNLYFAIYEDKEGKRHFETIALKVAAERLKDKQMPVPEINDAGLPLKFYLSPNDLVYVPTDEDRATAHPSIDKMRIYKMVSATDRQCFFLPFTVASVISNKVEFEALNKMERVLDASEYSSAYDSSHVNKVMVKNVCWKLEVDRLGNITKIVR

SEQ ID NO: 1147 - protein, 992 aa, Prevotella sp.
MITRILGLDTGTNSLAWAVVDRDANGNYTLVKRGDVIFTEGVKIEKGIESSKAAERTAHKALRVHYSRRRLHKIDTLKVLVELNLCPCLSDEQLSQWKAKKTYPLTDDFMLWQRSGSAEENNPYYCRHRCLTQKLDLTDQSQRFLLGRAFYHLAQRRGFLSNRLDTSADSDESGKVKSGIAQLSVEMEKAGCEFLGEYFYQLYKQHGNTIKLRSRYTDREEHYKKEFLAICEKQELDPKWVEALQRAIYFQRPLKSQRKGVGKCTFEPKKPRCAESHPDYEAFRMLCFLNNVKIQTPNDTSLRPLNEDEREKIWPIFFRKSKPNFDFEDIAKALAGKNNYAWYKDAGEKPFKFNYRMQQGVSGCPVTAQLIDIFGSDWQTAIAETYTAVEKKNGTKTIDEMADDVWNVLYSFSSKDKLKAFATEKLQLDEASATKFANAKLPHGFASLSLKAIRNILPFLRQGFIYAHAVHLAKIPDIVTKAVWNDADKREMILSGLMEIIENYNPKDRGVEGTIDFCIKSHLQDVIDLRPGAADALYHPSMIETYPDAKLNKMGVFQLGSPRTNAIRNPMAMRSLHILRSVVNQLLRDGIIDRDTEVHVEYARELNDANKRKAIADYQREQEKKRKQYRDDIIALYKSECHKEIEPTDTDILKFQLWEEQNHLCLYTGTQIGICDFLGDNPKFDIEHTVPRSVGGDSTQMNLTLCDATFNRQVKGAQLPSQLSNHADILVRIDHWKSKCEDLRKQLDKIRTYGGMEKNMKDRLIQKRHRLKMDLDYWQGKYSRFTMTEVPEGFSRRQGAGIGLVSKYAGLFLKSLFHNEQNPNKSNVYVVKGVTTAEFRRMWGLQGEYEKKSRLNHCHHCIDAITIACIGKAEYDKMAQYYHDEELFQWRGTTTKPHFNKPWPTFTEDVLAIEQSLLVKHLTKDNMPKQAKKRVRTATGKYLAQGDTARGSLHKDTYYGAIEQNGEIRYVLRKPLNKFENEAELEKIVDQA

SEQ ID NO: 1148 - protein, 1375 aa, Prevotella sp.
MKKILGLDLGTTSIGWALVNESENKDEQSSIVRLGVRVIPLTVDEKGNFEKGKAITTNADRQQVHAARINLQRYKLRRENLRDCLQKQGWIGSEPMCEDGKSSTFETYKLRAKAAVEEVSLHEFARVLFMLNKKRGYKSNRKANDKEEGKLFDGMTIAKKLYEEHLTPAEYSLQLLNTGRKFTPEYYRSDLIEEFEKIWNEQQKYYPEILTDEFKQQLEGKAKSNTSKLFLGKYGIYSADTKGLDRRLQPLKWRVEAMKQQVDKDVLAFVISDLKGQIANTSGLLGAISDRSKELYFSKQTIGQYLWASLQENPHISIKNQPFYRQDYLDEFEKIWETQATYHKELTSELKQEIRDIIIFYQRPLKSKKNLIAVCELEQRKVKVTVDGKEKEITIGPKIAPKSSPMFQEFRIWQNLNNILLLDHETNSKRPLYEEERNLLYEELSVKEKLSKTEALKVLGKKSKQWDLNYKELEGNRTQAVLYDCYNRIIVMSGHEECNFKKLKASDIRHYVKMIFKNLAFNTDILCFDSSLKGHELERQPMCQLWHLLYSYEGDNSRTGNDALLRKLETSFGFPKEYAAVLADVIFEDSYGNLSVKAMRNILPHLQAGKDYSQACEEAGYKHSRRSLTKEELNQKVYKEKLELLPKNSLHNPVVEKILNQMVNVINAVIEEYGKPDEIRIELARDLKIGAAERENMTRSINQGNAENKRIREILEKEFALSYLSRNDIIKYKLYEELKSNGFKTLYSDTYISKDKLFSKDFDIEHIIPKARLFDDSLSNKTIEARDVNIAKSNKTAFDFILERYGEQGVKTYKTKLLRLLEDGAISNKKYNNLLKTEADIPSGFIDRDLRNTQYIAKKAYEILSELVKIVTPTTGSVTNRLREDWQLVDVMKELNFEKYQKLGLADVIEDRDGRKVKRIKDWTKRNDHRHHAMDALTIAFTKPSYIQYLNNLNARSDKSSSIYGIEVKELHREEGKFRFNAPLPINEFRAEAKRHLKSVLVSIKAKKKVMTQNVNKIKTKHGIIKKVQLTPRGELHNATYYGTKKRPLVRMVKVGAALDEATIKRVCSPAIRAALLKRLNAYNGDAKEAFTGRNSIDKNPIYLDIEQTKLVPVLVKTIEWGMYHPIRKRITPDLKIDKVIDKGIREKLKARLAEFNGDAQKAFSNLDENPIYMDEAKRITLKRVSIEGVLSAIPLHTLKDKAGKPVIGSDGKPVFGDYVQTSNNHHIAFYIDDKGNLQDNPVSFFEAAERKSQGVPVIDRRYNCDKGWHFVFTMKQNEYFVFPNEATGFIPSEVDLLDEANYCIISPNLYRVQKLSKASGRDYWFRHHLETMLNDDLRLKNSTFKRIQSLKGLEDIVKVRINSIGKIVAVGKYD

SEQ ID NO: 1149 - protein, 1483 aa, Prevotella sp.
MKTILGLDLGTNSIGWAKVSVDDYGNYLHDIKLGSRIIPMSQDVLGNFDSGVTVSQTAQRTEFRSKRRLVQRNLQRRERLHRVLHVLDFLPAHYDAAIGWDRTEAVTYGKFLNHAEPKLAWEELGNGKRRFLFMDSFHEMVADFARCQPALVADGKKIPLDWTIYYLRKKALTQAITKEELAWILLNFNQKRGYYQLRGEEEEENPTKQEEYYELKVVSVEATDSRKGNDTWYNVHLENGWIYRRSSKISLDDWVGKVKQFIVTTEYEKDGTTLKTDKEGNVKRSFRAPNENDWGLRKKRTETLLEMSGKTVGAFIYDHLLQEPADKIRGNFIRTIERHYYKAELEAILAEQCKYHIELRDKEMLEACARELYLNNLPHQRSLMKKDMTYLLLYDLIFYQRPLKSKKALIANCPYEYYEYVDKETGEIKRQNIKCIAKSNPYFQEFRLWQFVLNLRLFDRVEDKEVTANYLPTADDHARLFTYLNDRKEINQETLLKDYFKLKKVKIGNEKEYPIRWNYIEDKEKKYPCNETRYELLMALDRAGIEHKWLDDNNLEYRLWHLLYSVEVKSESETALRKLKNDDAFVNSFLKVKPFKKEYGAYSEKAIKRLLAVMRKGFLWNEQDICDETRKRIEIIIKGDVDEKVKERMGHAAYSFDRVSDFQGLPEWLACYVVYGRHSEAMDIQRWDSPERLMAYINNFKQYSLRNPIVEQCILETLRTVHDIWKETGQIDEIHVELGREMKSTSEERARRTQNVLRNENTNLRIKSLLIELKNDTDICNVHPYSPMQQEILRIYEEGALQELNREDEDFEEISKISQMSQPSGKELNRYKLWLEQKYRSPYTGKAISLAKLFTPAYQIEHVIPQSRYFDDSFTNKVICEAEVNTLKSNLLGYEFIKKHGGEIIHCTTLGDVRIFSESEYKAFVMDHYANNKSKKDKLLMEDIPQEFLSRQMNDSRYISKVVKTLLSNIVRMADESEATSKSVIVCTGGVTDRLKKDWGLNDVWNSIVYSRFERLNRLTGTEAFGHWENKDGKRVFQTSMPLELQRGFRKKRIDHRHHAMDALVIACASRNIVNYLNNESANNPKKREDLRRQLCDKNRVIRKPWETFTQDAYNALENVVVSFKNYVRVINKATNRYEHYDENGKKRFVQQKGSELWAIRKPMHKETYYGHVNLRRKELVTLQKALDDIPSICDKKLRDYISALVEKHFNKRQLLAHFKSTDYYWQKQYVNKVYVWTFSDDIKPLVATRKLLDTSFDAKRIGTITDTGIQKILRNYLEAKGGNATLAFTPEGIVEMNQNISKYNDGKPHQPILKVRITEPMGAKYRVGQTENKMAKYVEAQSGTNLYFAIYEDSEGKRSYTTVPLDEVAERLKQRLSPVPEKDENDVPLKFYLSPNDLVYVPTEEELQLRECKLNKDRIYKMVSSTGSECHFIPYYVANVIYNKVEFEAKNKIGRALTGEMIKAVCWKLEIDRLGNILKVIK

SEQ ID NO: 1150 - protein, 593 aa, Prevotella sp.
MNTRILGLDTGTNSLAWAVVDRDAKGNYTLVRRGDVIFTEGVNVDGQPVPSKAAVKSKYKSLRVQYARRRLRKIDTLKVLVSLDLCPYLSDQQLSQWKAKKTYPLTDDFMLWQRSGSAEENNPYYCRYRCLTQKLDLTDQSQRFLLGRAFYHLAQRRGFLSNRLDTTSDSAESGKVKSGIAQLSVEMEKAGCTFLGEYFYQLYKQHGNTVRLRSRYTDREEHYIKEFLAICEKQELDAQWVEKLQRALYFQRPLKSQRKGVGKCTFEPKKPRCAESHPDYEAFRMLCILNNIKIKTPKDVSLRPLNAEEREKVWPLFFRKSKPNFDFEDIAKALAGKNNYAWYKDAGEKPFRFNYRMHQGVSGCPVTAQLIDIFGSDWKAGIAETYTAVGKKNGTKTIDEMADDVWNVLYSFSSKDKLKAFATDKLQLDEARATKFANAKLPHGFAALSLKAIRNILPFLRQGFIYAHAVLLAKIPDIVTAAVWDDADKREQILSGLLEVIENYNPDDRGIEGTIDFCIKSHLQDVVDLRPGAADALYHPSMIEAYPDAKLNKMGVFQLGSPRTNAIRNPMAMRSLHILRSVVNLLLRDGMLS

SEQ ID NO: 1151 - protein, 1424 aa, Prevotella sp.
MTQKVLGLDLGTNSIGSAVRNLDLSDDLQWQLEFFSSDIFRSSVNKESNGREYSLAAQRSAHRRSRGLNEVRRRRLWATLNLLIKHGFCPMSSESLMRWCTYDKRKGLFREYPIDDKDFNAWILLDFNGDGRPDYSSPYQLRRELVTRQFDFEQPIERYKLGRALYHIAQHRGFKSSKGETLSQQETNSKPSSTDEIPDVAGAMKASEEKLSKGLSTYMKEHNLLTVGAAFAQLEDEGVRVRNNNDYRAIRSQFQHEIETIFKFQQGLSVESELYERLISEKKNVGTIFYKRPLRSQRGNVGKCTLERSKPRCAIGHPLFEKFRAWTLINNIKVRMSVDTLDEQLPMKLRLDLYNECFLAFVRTEFKFEDIRKYLEKRLGIHFSYNDKTINYKDSTSVAGCPITARFRKMLGEEWESFRVEGQKERQAHSKNNISFHRVSYSIEDIWHFCYDAEEPEAVLAFAQETLRLERKKAEELVRIWSAMPQGYAMLSQKAIRNINKILMLGLKYSDAVILAKVPELVDVSDEELLSIAKDYYLVEAQVNYDKRINSIVNGLIAKYKSVSEEYRFADHNYEYLLDESDEKDIIRQIENSLGARRWSLMDANEQTDILQKVRDRYQDFFRSHERKFVESPKLGESFENYLTKKFPMVEREQWKKLYHPSQITIYRPVSVGKDRSVLRLGNPDIGAIKNPTVLRVLNTLRRRVNQLLDDGVISPDETRVVVETARELNDANRKWALDTYNRIRHDENEKIKKILEEFYPKRDGISTDDIDKARYVIDQREVDYFTGSKTYNKDIKKYKFWLEQGGQCMYTGRTINLSNLFDPNAFDIEHTIPESLSFDSSDMNLTLCDAHYNRFIKKNHIPTDMPNYDKAITIDGKEYPAITSQLQRWVERVERLNRNVEYWKGQARRAQNKDRKDQCMREMHLWKMELEYWKKKLERFTVTEVTDGFKNSQLVDTRVITRHAVLYLKSIFPHVDVQRGDVTAKFRKILGIQSVDEKKDRSLHSHHAIDATTLTIIPVSAKRDRMLELFAKIEEINKMLSFSGSEDRTGLIQELEGLKNKLQMEVKVCRIGHNVSEIGTFINDNIIVNHHIKNQALTPVRRRLRKKGYIVGGVDNPRWQTGDALRGEIHKASYYGAITQFAKDDEGKVLMKEGRPQVNPTIKFVIRRELKYKKSAADSGFASWDDLGKAIVDKELFALMKGQFPAETSFKDACEQGIYMIKKGKNGMPDIKLHHIRHVRCEAPQSGLKIKEQTYKSEKEYKRYFYAAVGDLYAMCCYTNGKIREFRIYSLYDVSCHRKSDIEDIPEFITDKKGNRLMLDYKLRTGDMILLYKDNPAELYDLDNVNLSRRLYKINRFESQSNLVLMTHHLSTSKERGRSLGKTVDYQNLPESIRSSVKSLNFLIMGENRDFVIKNGKIIFNHR

SEQ ID NO: 1152 - protein, 241 aa, Prevotella sp.
QAVKEKIKEAIAGKNFKTAIAEPIFMNKEKGIRINKVRYYVKAQERLKIRQQRDLSSKEYKQFFCVENESNYLLAIYEGELKGKKERDFCVVNNLDSAACLKRSNKGKAAPLVPERSEERNLPLLAVLKRGTQVLFYENSPEEILFDNPQDLVRRLYKVTGINTKKDVKNGKTYLYGNIELRFHQNAQKKDDVKMQSGVYKNNEVLRQGIVLSHKQFKALVEGVDFEFNVLGEIKKKERHA

SEQ ID NO: 1153 - protein, 1216 aa, Prevotella stercorea
MTKILGIDTGTNSLGWAIVDKTADNYNLLDKGVNIFQEGVKIEKGIESSKAAERTEHRATRVRYYRIKLRKIRLLRILSDNHLCPPLSQEELSTWRLKKVYPKNELFMQWQRTDDDTEKTPYAYRHKCIHEKLDLSDVTDRYILGRAFYHIIQRRGFLSNRKEQGGEDSGKVKEGISTLTHEMNEAGYEYLGDYFYALYNKGEKIRKHYTARNEHFLSEFKAICEKQDLEKELGSEVVRNIEKAIFDQRPLKSQKGQVGKCVFEKNKTKCPSSHPMYEEFRMLTFINNIKIKTPNDDVLRPLNTGEREKIMPLFFRKSKKQFDFEDITKKLAPKKMYGFYKKEEDAEMPFLFNYPMDTSVSGCPVTAALKDVFGDDWITAICETYTLGEGKSRFDIVNDIWHALYFYSDKDKLAEFAINRLQLSEDEAKIFSEISLPADYASLSLKAICKILPYLRRGLIYSHAVFLGNLCEVMPKYEWSIKEMRETIIDNIIMEMDKCDTKDKRTFEVCIKDYLKGQYNVSDNSLKKLYHPSMIETYPRVQYTNEHGVYQLGSPRIDSVRNPMAMRSMFRLRKLVNRLLVEGKIDQNTEVHIEFARELNDANKRNAIALFVKENQSANDEARKQIITLFKKETGTDIEPTDKDILKYVLWEEQNHICLYTGKQIRISDFIGANPKFDIEHTIPRSVGGDSTKMNLTLCDSRFNREVKKTKLPVELPNHDEIMERIKEWKKNYELLDIQIRKNKKLSKGATTKEQKDTIIRKRHLLELRRDYWRGKYERFTMESVPEGFSRRQGTDISVISKYARLYLKSLFNRVYTVKGIATSDFRKIWGIQDIYSKKERINHVHHCIDAIVIACIGLDEYNKLGAYYHDEENNKWYGMSKASFKKPWATFVEDIKKIQDEILVYHYTPDNMPKQGRRRIKIDGKKILCKGDAARGSLHNDTYYGAIENDGAVKYVKRIDLASLEEKDVKNIVDDTVRSIIEAAIKEKGFKDAMASTIWMNEEKRVPIKKVRCFTPSITKPLNIRKQRDVSIKEYKQQYHVANDSNYLLALYIGTDNKGKEKREFEIVNILQAAQYYRTSNDKEVVDRHIVPIKSEHDYPFAYTLKIGTMVLLYEKSPNEVWDATIKERNRRLYKVTGLSTMRMKGRNGEYAYATVKLIHNEEARPSKDIKAKNGEYEQGEEFRPAIIMLHTQLNALVQGYDFEINELGEIRRLR

SEQ ID NO: 1154 - protein, 1487 aa, Prevotella timonensis; identical to SEQ ID NO: 130

SEQ ID NO: 1155 - protein, 770 aa, Pseudoramibacter alactolyticus
MAKGYFASDEEIDFSGVDDGFKNTLSSHQKFKEIFDVEVLNDWQKSMSEKIIFWATVYGDSKKFLKERLEDAYGNELDQKQIKRILGLRFKDWGRLSEAFLNLEGKNSKTNQSQTIIEALWNGDGTNNFNLMELLSSQFTYRDTLKKRALKGEKTLTNITYEDLSDLYLSPSVRRMVWQTILIVKELRQVLGAGPAKIFIEMARDVTLKAGTRTTSRRQQLLDLYKNVQTESRNWVEEIETQEESRFRSKKIFLYYTQMGQCMYTGEPIVFKDLFNRNLYDIDHIYPRHFVKDDSLINNLVLVKKQANSHKSDTFPIENSIQQARRDFWKWLSEKGLISREKFNRLTRRTSFSDEELAGFISRQIVETRQGTKAVAQIFENALPDSEVVYVKAGNVSDFRHHFNLLKCREINDLHHAQDAYLNVVVGNVYHTKFTKNPINFIKGYRKDRKAYAYHMDQIFDHPVKRNDIIAWQTDKNQSIATVKKVMAKGTPLVTRMSYEEHGELSNQNICSAKAAQKAEGKGYLPIKNSERLSNTQRYGGYNKYAGSYFFLVEHTLKKNRVRTIETMPLFLRDTIKTSKDLLKYCCESLKLEAPSIRVMKIKMGSLLSVNGAFVYLTGRSGKKLITPNGFQLILPQKWQDYIRLLIKTKDSPDDVEGISGGKNIEFYDILVEKHTKTCLKNRPNPIGEKLREWRNDFIALDNQKQSDILLEILKLTTFDNSGADLRAIGGKNQSGVSTIGKKISSQKSVVLVHRSVTGIFEKQVDLLSI

SEQ ID NO: 1156 - protein, 103 aa, Rhizobium etli
MSGEQLTREIGRSGVKASAVGLGTWAIGGWMWGGTDEAQSIAAIQASLDAGVTLIDTAPAYGLGRSEEIVGKALAGRRDKAVIATKCGLVWHTQKGNHFFDQD

SEQ ID NO: 1157 - protein, 1059 aa, Rhodovulum sp.
MGIRFAFDLGTNSIGWAVWRTGPGVFGEDTAASLDGSGVLIFKDGRNPKDGQSLATMRRVPRQSRKRRDRFVLRRRDLLAALRKAGLFPVDVEEGRRLAATDPYHLRAKALDESLTPHEMGRVIFHLNQRRGFRSNRKADRQDREKGKIAEGSKRLAETLAATNCRTLGEFLWSRHRGTPRTRSPTRIRMEGEGAKALYAFYPTREMVRAEFERLWTAQSRFAPDLLTPERHEEIAGILFRQRDLAPPKIGCCTFEPSERRLPRALPSVEARGIYERLAHLRITTGPVSDRGLTRPERDVLASALLAGKSLTFKAVRKTLKILPHALVNFEEAGEKGLDGALTAKLLSKPDHYGAAWHGLSFAEKDTFVGKLLDEADEERLIRRLVTENRLSEDAARRCASIPLADGYGRLGRTANTEILAALVEETDETGTVVTYAEAVRRAGERTGRNWHHSDERDGVILDRLPYYGEILQRHVVPGSGEPEEKNEAARWGRLANPTVHIGLNQLRKVVNRLIAAHGRPDQIVVELARELKLNREQKERLDRENRKNREENERRTAILAEHGQRDTAENKIRLRLFEEQARANAGIALCPYTGRAIGIAELFTSEVEIDHILPVSLTLDDSLANRVLCRREANREKRRQTPFQAFGATPAWNDIVARAAKLPPNKRWRFDPAALERFEREGGFLGRQLNETKYLSRLAKIYLGKICDPDRVYVTPGTLTGLLRARWGLNSILSDSNFKNRSDHRHHAVDAVVIGVLTRGMIQRIAHDAARAEDQDLDRVFRDVPVPFEDFRDHVRERVSTITVAVKPEHGKGGALHEDTSYGLVPDTDPNAALGNLVVRKPIRSLTAGEVDRVRDRALRARLGALAAPFRDESGRVRDAKGLAQALEAFGAENGIRRVRILKPDASVVTIADRRTGVPYRAVAPGENHHVDIVQMRDGSWRGFAASVFEVNRPGWRPEWEVKKLGGKLVMRLHKGDMVELSDKDGQRRVKVVQQIEISANRVRLSPHNDGGKLQDRHADADDPFRWDLATIPLLKDRGCVAVRVDPIGVVTLRRSNV

SEQ ID NO: 1158 - protein, 1405 aa, Riemerella anatipestifer
MKTILGLDLGTNSIGWALVKEAENSNEKSEIIKLGVRVNPLTVDEKTNFEAGRPLSTNADRTAKRSARRNLQRYKLRRKNLIDLLIKNQLIDKDTPLTEIGKNTTHQTLELRAKAARERIELEDLARVFLAINKKRGYRSSRKVNNEEEGQAVDGMAVAKKLYDENLTPGQYAYELLSKGKKYVPDFYRSDLQAEFNAIWEYQKQFYADILDDELYNALKGQGQQNSRKRFLAIKGVYTAENKGKRDDVKLRHYKWRSEAISKKINIEEVAYVLVEINNDLNKSSGYLGAISDRSKELYFNKETVGENLWKQIQKNPHTSLKNQVFYRQDYLDEFEQIWETQAQFHPQLTLALKEQIRDVIIFYQRKLKSQKGLLSFCQFESWEIERKDENGNVILNKTTQLPKRQTVGRRVAPKSSPLFQEFKIWQNINNLEVTKISEGASKNKKETETLSDDERKLLFEELNLRGNLSQKEVLQILGLKDKEYKTNFSEGLEGNRTNAALFNIYQQIAENEGYGFDWSKKSAQEIKEELKAVFPQIGIQADILDFNANLDGKEFENQASYQLWHLLYSAEEDDKINEEDQIIYGNSAVSLKKKLCEKFGFTPEYAKWIANVSLQDDYGNLSTKAMRKIIPYLIDGNDYSEACALAGYNHSNSLTKEENDNRELLDKLELLPKNSLRNPVVEKILNQMVNVVNQVIETYGKPDEVRIELARELKKSAEKRAEMTKSINEATRRNEDIKKLITKDFGIPNPTKSDVVRYRLWEELAPLAYKDVFTGKQIKKEDLFSSKIDIEHIIPKALLFDDSFSNKTLVFRETNLKKADRTAYDFIESDYNATLDDYIQRVETLYNNTKGTISKGKRNKLLMAQKNLPDGFIERDLRNSQYIAKKAKAMLYQVFKDVNVTSGSITDRLREDWDLINVMKELNFPKYKALGLTEIEERYDIGQEKTKRVEVITDWTKRNDHRHHAMNALTVAFTTSSHIQYLNYLNARKNESHKEHKNIKGIENKITHKQKDKRKFIPPMPNFREEAKKHIETILVSIKNKNKVYTKNINKTKKKSGHNTKEQLTPRGQLHKETVYGKSKRPMSKPTKINKNFSLEQAQLIINVQEKELVLRHLAQFDNNPAVAFDTKTLKKMPLLKNGEPLKEVLCFEEIFTIRKDITPDLKIEKVVDEKIKAILEQRKKDFGGNAKEAFSDLDKNPIWLNKKKGICIKRVTITGVSNAEALHHQKDHLGREILDDNGNPIPADFVSTGNNHHLAVYLDSEGKLQDNIVSFYEAVVRTSQGLPVVDKGLNKDLGWKFLFSLKQNEMFVFPNDDFDINDFDLLDDKKAELISKHLYRVQKISKVSAGNSFVRDIVFRHHLETTVKEVKELKDISYIQLKSLEGLRNIKKVRINHIGKIVQVGEY

SEQ ID NO: 1159 - protein, 1145 aa, Riemerella anatipestifer
MKTILGLDLGTNSIGWALVKETENSNEKSEIIKLGVRVNPLTVDEKTNFEAGRPLSTNADRTAKRSARRNLQRYKLRRKNLIDLLIKHRLIDKDTPLTEIGKNTTHQTLELRAKAARERIELEDLARVFLAINKKRGYRSSRKVNNEEEGQVVDGMAVAKKLYDENLTPGQYAYELLSKGKKYVPDFYRSDLQAEFDSIWEYQKQFYADILDDELYNALKGQGQQNSRKRFLAIKGVYTAENKGKRDEVKLQHYKWRSEAITQKLSIEEVAYVLVEINNDLNKSSGYLGAISDRSKELYFNKETVGENLWKQIQKNPHTSLKNQVFYRQDYLDEFEQIWETQAQFHPQLTLALKEQIRDVVIFYQRKLKSQKGLLSFCQFESWEIERKDENGNVILNKTTQLPKRQTVGRRVAPKSSPLFQEFKIWQNINNLEIAKISDGNSKNKKETEALSDDERKLLFEELNLRGNLSQKEVLQILGLKDKEYKTNFPEGLEGNRTNAALFNIYQQIAENEGYGDWTKKSAQEIKEELKAVFPQIGIQADILDFNAELDGKEFENQASYQLWHLLYSAEEDDKINEEDQIIYGNSAVSLKKKLCEKFGFTPEYAKWIANVSLQDDYGNLSTKAMRKIIPYLIDGNDYSEACALAGYNHSNSLTKEENDNRERLNKLELLPKNSLRNPVVEKILNQMVNVVNQVIETYGKPDEVRIELARELKKSAEERAEMTKGINEATRRNEDIKKLITKNFGIPNPTKNDVVRYRLWEELAPLAYKDVFTGRQIKKEDLFSSKIDIEHIIPKALLFDDSFSNKTLAFRETNLKKADRTAYGFIESDYNATLDDYIQRVETLYNNAKGTISKGKRNKLLMAQKNLPDGFIERDLRNSQYIAKKAKSMIEKVFNDVNVTSGSITDRLREDWDLINVMKELNFPKYKALGLTEIEERYDIGQEKTKKVEVITDWTKRNDHRHHAMDALTVAFTTKSHVQYLNNLNTIHSLKGDEVDLELSKLYGLKNTITEVVNKKRKFIPPMPNFREEAKKHIETILVSIKNKNKVYTKNINKTKKESGYHTKEQLTPRGQLHKETVYGKSKRPMNKPTKINKNFSLEQAQLIINVQEKELVLRHLAQFDNNPAVAFDTKTLKKCHYLKMVNL

SEQ ID NO: 1160 - protein, 1400 aa, Riemerella anatipestifer
MKTILGLDLGTNSIGWALVKETENSNEKSEIIKLGVRVNPLTVDEKTNFEAGRPLSTNADRTAKRSARRNLQRYKLRRKNLIDLLIKHRLIDKDTPLTEIGKNTTHQTLELRAKAARERIELEDLARVFLAINKKRGYRSSRKVNNEEEGQVVDGMAVAKKLYDENLTPGQYAYELLSKGKKYVPDFYRSDLQAEFDSIWEYQKQFYADILDDELYNALKGQGQQNSRKRFLAIKGVYTAENKGKRDEVKLQHYKWRSEAITQKLSIEEVAYVLVEINNDLNKSSGYLGAISDRSKELYFNKETVGENLWKQIQKNPHTSLKNQVFYRQDYLDEFEQIWETQAQFHPQLTLALKEQIRDVVIFYQRKLKSQKGLLSFCQFESWEIERKDENGNVILNKTTQLPKRQTVGRRVAPKSSPLFQEFKIWQNINNLEIAKISDGNSKNKKETEALSDDERKLLFEELNLRGNLSQKEVLQILGLKDKEYKTNFPEGLEGNRTNAALFNIYQQIAENEGYGDWTKKSAQEIKEELKAVFPQIGIQADILDFNAELDGKEFENQASYQLWHLLYSAEEDDKINEEDQIIYGNSAVSLKKKLCEKFGFTPEYAKWIANVSLQDDYGNLSTKAMRKIIPYLIDGNDYSEACALAGYNHSNSLTKEENDNRERLNKLELLPKNSLRNPVVEKILNQMVNVVNQVIETYGKPDEVRIELARELKKSAEERAEMTKGINEATRRNEDIKKLITKNFGIPNPTKNDVVRYRLWEELAPLAYKDVFTGRQIKKEDLFSSKIDIEHIIPKALLFDDSFSNKTLAFRETNLKKADRTAYGFIESDYNATLDDYIQRVETLYNNAKGTISKGKRNKLLMAQKNLPDGFIERDLRNSQYIAKKAKSMIEKVFNDVNVTSGSITDRLREDWDLINVMKELNFPKYKALGLTEIEERYDIGQEKTKKVEVITDWTKRNDHRHHAMDALTVAFTTKSHVQYLNNLNTIHSLKGDEVDLELSKLYGLKNTITEVVNKKRKFIPPMPNFREEAKKHIETILVSIKNKNKVYTKNINKTKKESGYHTKEQLTPRGQLHKETVYGKSKRPMNKPTKINKNFSLEQAQLIINVQEKELVLRHLAQFDNNPAVAFDTKTLKKMPLLKNGEPLKEVLCFEEIFTIRKDITPDLKIEKVVDEKIKAILEQRKKDFGGNAKEAFSDLDKNPIWLNKEKGICIKRVTITGVSNAEALHHQKDHLGREILDDNGNPIPADFVSTGNNHHVAIYEDEKGKLQEKVVSLYEAVARANQGLPVVDKGLNEDLGWKFLFTMKQNEMFVFPNDDFDVNDIDLLDENNAKIISQHLFRVQKLATKNYMFRHHLETNVQEVKELNDIAYKSIRSTEPLKNIKKVRINHIGKIVQVGEY

SEQ ID NO: 1161 - protein, 1128 aa, Roseburia intestinalis
MDEKMDYRIGLDIGIASVGWAVLQNNSDDEPVRIVDLGVRIFDTAEIPKTGESLAGPRRAARTTRRRLRRRKHRLDRIKWLFENQGLINIDDFLKRYNMAGLPDVYQLRYEALDRKLTDEELAQVLLHIAKHRGFRSTRKAETAAKENGAVLKATDENQKRMQEKGYRTVGEMIYLDEAFRIGCSWSEKGYILTPRNKAENYQHTMLRAMLVEEVKEIFSSQRRLGNKKATEELEEKYLEIMTSQRSFDLGPGMQPDGKPSPYAMEGFSDRVGKCTFLGDQGELRGAKGTYTAEYFVALQKINHTKLVNQDGETRNFTEEERRALTLLLFTQKEVKYAAVRKKLGLPEDILFYNLNYKKAATKEEQQKENQNTEKAKFIGMPYYHDYKKCLEERVKYLTENEVRDLFDEIGMILTCYKNDDSRTERLAKLGLVPIEMEGLLAYTPTKFQHLSMKAMRNIIPFLEKGMTYDKACEEAGYDFKADSKGTKQKLLTGENVNQTINEITNPVVKRSVSQTVKVINAIIRTYGSPQAINIELAREMSKTFEERRKIKGDMEKRQKNNEDVKKQIQELGKLSPTGQDILKYRLWQEQQGICMYSGKTIPLEELFKPGYDIDHILPYSITFDDSFRNKVLVTSQENRQKGNRTPYEYMGNDEQRWNEFETRVKTTIRDYKKQQKLLKKHFSEEERSEFKERNLTDTKYITTVIYNMIRQNLEMAPLNRPEKKKQVRAVNGAITAYLRKRWGLPQKNRETDTHHAMDAVVIACCTDGMIQKISRYTKVRERCYSKGTEFVDAETGEIFRPEDYSRAEWDEIFGVHIPKPWETFRAELDVRMGDDPKGFLDTHSDVALELDYPEYIYENLRPIFVSRMPNHKVTGAAHADTIRSPRHFKDEGIVLTKTALTDLKLDKDGEIDGYYNPQSDLLLYEALKKQLLLYGNDAKKAFAQDFHKPKADGTEGPVVRKVKIQKKQTMGVFVDSGNGIAENGGMVRIDVFRVNGKYYFVPVYTADVVKKVLPNRASTANKPYSEWRTMEDKDFLFSLYSRDLVHIKSKKGIPIKNVDGSLGESKEVYAYYIGADISGAKIEGKAHDSRYTFRGIGVQKLELIEKCQVDILGHISTVKNEKRMGFS

SEQ ID NO: 1162 - protein, 1471 aa, Scardovia wiggsiae
MGYKAPRNDKGEIDYGVGLDLGNGSVGWVAMDKDYHLIRARGHELIGARLFDPANSAENRRESRTTRRRLSRRRWRLRMLDSLFASELAKIDPNFLARRKYSWVHPKDEQNHENWYGSIIFGSKEQDKQFYKDYPTIYHLRKKLTEDTERHDIREIYVAIHHIVKYRGHFLREGEINSENLFDPEGFVELIKDVIKLNNSYDESTPIFEASPADVSEALLNEHTSRSGRIEDTLDKLDFSVSRVDKHELKGMRDAAKAVIGAIVGNTADFSKIFNLDNLDKDSKDNLKLKFADSNFDEKYGGVVGSGLLDETQIELVDRIHAVYDAVALKGILGDAHTISEAKVESYEKHRKNWKLIKEELRTKENKDEVDLWYGDLSGRQYKNPPDPEKGPDEGSKKDSPIRDSDQKQNLIKKANDYFTELIDDSQLSEEQKNCLKNDINNGQLFPVQRSSDNGVIPYQIHLNELRRIIENQKQYYPFLAETFIRKTAEGKSYEENKIVALLKFRVPYYVGPLVSKEDMEEHSSGNSAYHWMARNPGRGEAITPWNFDEVVDKDESGARFISRLTGTDTYLLGEPTLPQHSLLYEEYMVLSELNNVRLNVRQGNHWSDKNRQRLSYKQKEFLIENLFKEHKTVTRKRAEDCLSSMGCGEVQLFGLSDEKKFASSLSSYITLKKILGKAFVDDSGNSAILERIIEVQTVFEDREPLTHQLSLIDSLTVEQRKQLAKIHYTGWGKLSRKLLTSKKGSYKIHSQNEIMRTQHSIIDIMRGDSLNLIEIIRDKKIGIGEWIDNENLDRETGESDVSRLESVFEGIVMSPRVKRGVVQAVRVIDDLAKAIGNPPQRIFIEMADEVQASQRTVSRLSRLKALYGSPSLQKEFNDLKDLRKSLNETKDADLQEDRLYLYYIQLGKDLYTGKEISIDSLSSAYDIDHIVPQALTQDDSIDNRVLVSRKENARKTDSYLYTPDLIKNMRPLWGKLLAAGLMSQKKYDALTRVDDFKDREKQRFVQRSLVETRQIMKNVSTILRTYYGEDTNVVTLKSSITHDMRKYLGFPYKNRDINDYHHAQDALCISAAGQFMLNRHFVSGGEVTDGASNAYNMYLAEYLQEFRDAKARGERKRSTAFGFVVGSMSSKDDEKRTDHRTGEIVWSETNAEYLRKVMNYKKMLITQKVGDVKTRALYDETRYGHKESSAKSIKFDNLRRDTSLYGGFSGASTAYMMLVEYKKKNKLVSITAQEASLLAVADQKNDTVSVMDGILASHGLSGAKILLPKIVTGQLLDYSDALVTLQSASELNTARQMWLPRNDYNDIDIILKSKDIEDAAHKLGYDSDTVHVLRRIQKLFEAVFRVAESQFPLHQLSKDQQEEILRDPQNYGFGSAVKLLGGLLKALHANAENTNLAGLVKVLHGDKEYSDDGKAKEFKKFGFSPRWRRISNPTGFTLSDSDTFIYQSPSGIFEQRVTVKELKEKADKQK

SEQ ID NO: 1163 - protein, 116 aa, Sphingobacterium spiritivorum
MFRKYFEEKNSARLLFTLKQGDFVYVPDDNEEVILDESSPLFIDYWKNISERSNNIHVVQKFSGKEIYFLKHTIADTIAKKIEFGSQDCYQSLNGKSIKEFCIKIDSDRLGNISKV

SEQ ID NO: 1164 - protein, 1306 aa, Sphingobacterium spiritivorum; identical to SEQ ID NO: 93

SEQ ID NO: 1165 - protein, 1110 aa, Sphingobium sp.
MAEGKKRIWRLGADLGANSLGWAAIELSAPVNGKPIAILAAGSRIFSDGRDPKSGASLAVDRRDARAMRRRRDRFKQRQKALIKYLIADGLFPADEAARNAMAAIDPYAVRARALDEALSLPELGRALFHLNQRRGFKSNRKADRKADDDAGKIAIGIDRTRDAIAEDEADAGAEPGSWTFGKWLHERRLKGQSVRTRLRPESGEDAKGDGYDFYPDRALMEEEFDAIWAAQAPHHPDVLTNDVHDRLHEIIFYQRPLKAPQVGMCSLIPGDRRLPKAHPLFQRRRLLEELNALMIVRPGEVAQRLTREERDILLLKLKDKNKVSFATLRKALKLDPDARFNKESEDRTDLKGDEVAAVMGSKTRFGNLWVHLSIEAQWDVLARLDAVESDAEDAAFCAWLVETYALTPEQARAVANAPLPPGYGRFGETATRKLIEALRDGKKDDRVLVYSEAVTEAGLGHHSDRRTGEVFEDAKGRPQLPYYGVALERHIMPGTGDPSDPEEMRVGRLTNPTVHIGLNQLRRILNVLIRAYGPPAEIAIELARELKLTDEDKKRINRENNDNRIAAERRSEKLLAIGQADSGANRALLKLWEELNPANVLDRRCIYSGRQISIDMLFSAAVEVDHILPFAATLDDSNGNKIVCLREANREKRKRSPHDAWGHSARWDEIAARAAQLPRNKRWRFEPDAMDKFRDEGGFQARHLVDTQYLARLSREYLATLYPEKGEGSGHIWVSPGRLTEMVRRKLGLNDLLPDHNFGGGADQAKNRLDHRHHAIDAVVVAIVDRGMLNAIARASGQEGAEGRERIIIPEPWDGFRDALRETVNRITVSHRTDHGTASKAGLPKGKDATAGRLHNDTAYGFTGDTDAKGNSIVVRRVPLSSFKKLADLDRIRDADLKAALYQHLNGLEGKAFEKALAEFHKLEWHNFGGVRRVRVTEPLTVIPIKDRNGRIYKGYKGDSNYRYDVWELPDGKWVTNWKNEAGEAMSSVISMFDAHQSSEPPRPHPAARKILSLHQNDLLAIEREGEDRKLMRVVKFGQSGQITLAEHQQAGDLKKRDAVSNDDDPFKYFAPTSGGLKKVKARQVRIDEIGRVLDPGFPARTARRKTRG

SEQ ID NO: 1166 - protein, 1084 aa, SporoLactobacillus vineae
MKYSIGLDIGISSVGWSVINLDRERIELMGARLFDAAENPKNGSSLAAPRRDARSARRRLRRRRYRVGRVRHFIIDRGLVTRGQADQLFDWKDGDLDIWLVRVNALERLLTDREFARVLIHIAKNRGYRSNRKSEAKSGENGQVLSAIKANKELMEEKGYQTVAEMLVNEPETFAGRKRNRGGEYTHVIARSELEHEIRLIFTKQRAFGNRFATEENENTYVKIWAAQRPVATKDDILKKIGDCTFEKGEKRAPKASYAFQYFRALDKLNRLRILSVREPSRNLTDDERNLIVPALFNHDKQKYSDLRKILQLRDDQKFNELFYDPGKSLKENENKTFLSLAEQYKIRKVIRDVQGKDGLLQYRPLDIDTIAYALTVFKDDQDTRDYLSNTFVNGNGKQVLNLANRAFDAELIDGLLSLSFAKFGHLSLKALHKLIPHMEQGLSYYDACKKVGYHDNEQVGKSKQHLLPVIPADEIRNPVVVRSLSQTRKVINAIIKRYGSPTFMYIELAREMGRPYNERRDLEKQYNKNRTVNDSAIEQIHELYPEIGAPRGHDILKYKLWQQQDCKCAYSLEKIPAEKIFEPGYAEVDHIIPYSRSFDDSNSNKVLVLSRMNQEKKNRTPYEWFGGDEHRWNKFESYVNALKVNRKKKSLLTKKNMDTEEEDTFKSRHLNDTRYITRFIKSFVEDNLLFREIEGAKQHVFTVNGAYTSLMRKRWGFNKNREESDLHHSVDAVIIAVSQPFRNEVSRYFKHREISLPQLLKRTWDYFPEPWEGFVKELRARTLQDPEKLKLALESLDLDSYDPEFIDEVKPIFISRMPKRSIKGQIHDETLRRNRGKTKDGFVKIVTRTRLENIKFDKNGDFPMYGRESDPKTYQAIKQRYLENNKDKKKAFIEPLYKPAKNPNNASLIRSVKIEDKANQIVPLRDEAVAYNASIVRTEVYRNKETGKFYLAPVYVSDVFAGREPRRFIRANVPYEQWVNITDKFTFLFNLYPNDVIYIKMKKVKTTKSNINKTISWQESYFYFKGTDIHTGAITIIDHMNSFTDRVGTQGLQLFEKYQVDPLGNLSRVHGETQYGVPALSHS

SEQ ID NO: 1167 - protein, 475 aa, Staphylococcus massiliensis
MGQDYILGLDIGITSVGYGLIDYHDKSVIDAGVRLFKEANVENNEGRRSKRGSRRLQRRRKHRLARTRNLLESYQLNPFPKCEKNPYEIRVKGFKEVLTSDELSAALLHLAKRRGIDNVHVTDTESDSSDNGLSTKEQLAKNQKALESRYVCELQLERLLNDNKVRGANNRFKTQDFVREAKQILSIQKDHHNLDQVFIDKYISLLETRREYYEGPGKGSPYGWDGDIKKWYELLMGRCTYFPESLRSVKYAYSADLFNALNDLNNLVIVRDENDKLTYPEKYHIVENVFKQRKKPTLKQIAKEIDVAPEDIRGYRVTASGTPVFTSFKLYHDIKSVTSNDKVLEDTELLDAIAEVLTIYQSPIEVQEKLESLNVILTKEEIEGISKLTGYTGTHALSLKAIQIVIDELWETNDNQMTIFTRLNMKPQKVDLAKANKIPTSLVEDFIISPVAKRAFIQSIKVINAVIKNMVCLKI

SEQ ID NO: 1168 - protein, 581 aa, Staphylococcus massiliensis
MPKDIIIELAREKNSDEERKIIRDVQKRNQQTRDLVDKVIKETGKTKAKGMVEKLILHDKQEGKCLYSLKSIPLEDLLNNPHHYEVDHIIPRSVSYDNSMNNKVLVLQEENSKKSNQTPFQYFNSSNTHITFKQFKQHVLNLSKTKDRITKKKKEYLLEERDINKFSVQKEFINRNLVDTRYATRELMTLLRAYFSANELDVKVKAINGGFTSYLRKRWDFKKDRNAGYKHHAEDALIIANVDFIFKQLKALDNAKKVMEGRKVQVEKDNVEDNEHYESLFREPDQIKEIKLYDNYKFSHRVDKKPNRELINDTIYSTRKVDNKTYTIQTVNNIYDKQNDQLKKLFNKSPEKFLMYKHDPKTFDKLATIMRQYKNEKNPLYKFHDETGEYLTKYAKKDNGPIVKSLKYIGKQVNAHLDITNDYENSNNKVVKLSLKPFRFDVYLDDGKYKFVTVKYLDIIKKDTYYVIDEEKYKLALQQKKISENAKFIGSFYNNDLIKINGELLRVIGVNDDAKNTLELNMIDISYRDYVENMNLATTPRIRKNIGKSITILEKYTTDILGNTFKISSPEKPQFIFKVRD

SEQ ID NO: 1169 - protein, 1334 aa, Staphylococcus pseudintermedius; identical to SEQ ID NO: 200

SEQ ID NO: 1170 - protein, 1112 aa, Staphylococcus simulans; identical to SEQ ID NO: 247

SEQ ID NO: 1171 - protein, 773 aa, Streptococcus agalactiae
MNKPYSIGLDIGTNSVGWSIITDDYKVPAKKMRVLGNTDKEYIKKNLIGALLFDGGNTAADRRLKRTARRRYTRRRNRILYLQEIFAEEMSKVDDSFFHRLEDSFLVEEDKRGSKYPIFATLQEEKDYHEKFSTIYHLRKELADKKEKADLRLIYIALAHIIKFRGHFLIEDDSFDVRNTDISKQYQDFLEIFNTTFENNDLLSQNVDVEAILTDKISKSAKKDRILAQYPNQKSTGIFAEFLKLIVGNQADFKKYFNLEDKTPLQFAKDSYDEDLENLLGQIGDEFADLFSAAKKLYDSVLLSGILTVIDLSTKAPLSASMIQRYDEHREDLKQLKQFVKASLPEKYQEIFADSSKDGYAGYIEGKTNQEAFYKYLSKLLTKQEDSENFLEKIKNEDFLRKQRTFDNGSIPHQVHLTELKAIIRRQSEYYPFLKENQDRIEKILTFRIPYYIGPLAREKSDFAWMTRKTDDSIRPWNFEDLVDKEKSAEAFIHRMTNNDFYLPEEKVLPKHSLIYEKFTVYNELTKVRYKNEQGETYFFDSNIKQEIFDGVFKEHRKVSKKKLLDFLAKEYEEFRIVDVIGLDKENKAFNASLGTYHDLEKILDKDFLDNPDNESILEDIVQTLTLFEDREMIKKRLENYKDLFTESQLKKLYRRHYTGWGRLSAKLINGIRDKESQKTILDYLIDDGRSNRNFMQLINDDGLSFKSIISKAQAGSHSDNLKEVVGELAGSPAIKKGILQSLKIVDELVKVMGYEPEQIVVEMARENQTTNQ

SEQ ID NO: 1172 - protein, 1370 aa, Streptococcus agalactiae
MNKPYSIGLDIGTNSVGWSIITDDYKVPAKKMRVLGNTDKEYIKKNLIGALLFDGGNTAADRRLKRTARRRYTRRRNRILYLQEIFAEEMSKVDDSFFHRLEDSFLVEEDKRGSKYPIFATMQEEKDYHEKFPTIYHLRKELADKKEKADLRLVYLALAHIIKFRGHFLIEDDRFDVRNTDIQKQYQAFLEIFDTSFENNHLLSQNVDVEAILTDKISKSAKKDRILAQYPNQKSTGIFAEFLKLIVGNQADFKKHFNLEDKTPLQFAKDSYDEDLENLLGQIGDEFADLFSAAKKLYDSVLLSGILTVTDLSTKAPLSASMIQRYDEHREDLKQLKQFVKASLPEKYQEIFADSSKDGYAGYIEGKTNQEAFYKYLSKLLTKQEDSEYFLEKIKNEDFLRKQRTFDNGSIPHQVHLTELKAIIRRQSEYYPFLKENQDKIEKILTFRIPYYVGPLARGNSDFAWMTRKTDDSIRPWNFEDLVDKEKSAEAFIHRMTNNDLYLPEEKVLPKHSLIYEKFTVYNELTKVRYKNEQGETYFFDSNVKQEIFDGVFKEHRKVSKKQLLDFLAKEFEEFRIVDVTGLDKENKAFNASLGTYHDLKKILDKDFLDNPDNESILEDIVQTITLFEDREMIKKRLENYKDLFTESQLKKLYRRHYTGWGRLSAKLINGIRDRESQKTILDYLISDGRANRNFMQLINDDGLSFKSIISKAQSGSHSDNLKEVVGELAGSPAIKKGILQSLKIVDELVKVMGYEPEQIVVEMARENQTTNQGRRNSRQRYKLLEDGVKNLASDLNGDILKEYPTDNQALQNERLFLYYLQNGRDMYTGEALDIDNLSQYDIDHIVPQAFIKDDSIDNRVLVSSAKNRGKSDDVPSIDIVKARKAFWKKLLDAKLISQRKYDNLTKAERGGLTPDDKAGFIQRQLVETRQITKHVARILDERFNNKVDDNNKPIRKVKIVTLKSNLVSNFRKEFGFYKIREVNNYHHAHDAYLNAVVAKAILTKYPQLEPEFVYGDYPKYNSYKTRKSATEKLFFYSNIMNFFKTKVTLADETVVVKDDIEVNNETGEIAWDKKKHFATVRKVLSYPQVNIVKKTEVQTGGFSKESILAHSNSDKLIPRKTKDIYLDPKKYGGFDSPIVAYSVLVLADIKKGKAQKLKTVKELIGITIMERERFEKNPSAFLESKGYLNIRTDKLIILPKYSLFELENGRRRLLASAGELQKGNELALPTQYMKFLYLASRYNESKGKPEEIEKKQEFVNQHVSYFDDILQLINDFSKRVILADANLEKINKLYSDNKDNTPVDELAKNIINLFTFTSLGAPAAFKFFDKSVDRKRYTSTKEVLDSTLIHQSITGLYETRIDLGKLGED

SEQ ID NO: 1173 - protein, 1370 aa, Streptococcus agalactiae
MNKPYSIGLDIGTNSVGWSIITDDYKVPAKKMRVLGNTDKEYIKKNLIGALLFDGGNTAADRRLKRTARRRYTRRRNRILYLQEIFAEEMSKVDDSFFHRLEDSFLVEEDKRGSKYPIFATMQEEKDYHEKFPTIYHLRKELADKKEKADLRLVYLALAHIIKFRGHFLIEDDRFDVRNTDIQKQYQAFLEIFDTSFENNHLLSQNVDVEAILTDKISKSAKKDRILAQYPNQKSTGIFAEFLKLIVGNQADFKKHFNLEDKTPLQFAKDSYDEDLENLLGQIGDEFADLFSAAKKLYDSVLLSGILTVTDLSTKAPLSAYMIQRYDEHREDLKQLKQFVKASLPEKYQEIFADSSKDGYAGYIEGKTNQEAFYKYLSKLLTKQEDSEYFLEKIKNEDFLRKQRTFDNGSIPHQVHLTELKAIIRRQSEYYPFLKENQDKIEKILTFRIPYYVGPLARGNSDFAWMTRKTDDSIRPWNFEDLVDKEKSAEAFIHRMTNNDLYLPEEKVLPKHSLIYEKFTVYNELTKVRYKNEQGETYFFDSNVKQEIFDGVFKEHRKVSKKQLLDFLAKEFEEFRIVDVTGLDKENKAFNASLGTYHDLKKILDKDFLDNPDNESILEDIVQTITLFEDREMIKKRLENYKDLFTESQLKKLYRRHYTGWGRLSAKLINGIRDRESQKTILDYLISDGRANRNFMQLINDDGLSFKSIISKAQSGSHSDNLKEVVGELAGSPAIKKGILQSLKIVDELVKVMGYEPEQIVVEMARENQTTNQGRRNSRQRYKLLEDGVKNLASDLNGDILKEYPTDNQALQNERLFLYYLQNGRDMYTGEALDIDNLSQYDIDHIVPQAFIKDDSIDNRVLVSSAKNRGKSDDVPSIDIVKARKAFWKKLLDAKLISQRKYDNLTKAERGGLTPDDKAGFIQRQLVETRQITKHVARILDERFNNKVDDNNKPIRKVKIVTLKSNLVSNFRKEFGFYKIREVNNYHHAHDAYLNAVVAKAILTKYPQLEPEFVYGDYPKYNSYKTRKSATEKLFFYSNIMNFFKTKVTLADETVVVKDDIEVNNETGEIAWDKKKHFATVRKVLSYPQVNIVKKTEVQTGGFSKESILAHSNSDKLIPRKTKDIYLDPKKYGGFDSPIVAYSVLVLADIKKGKAQKLKTVKELIGITIMERERFEKNPSAFLESKGYLNIRTDKLIILPKYSLFELENGRRRLLASAGELQKGNELALPTQYMKFLYLASRYNESKGKPEEIEKKQEFVNQHISYFDDILQLINDFSKRVILADANLEKINKLYSDNKDNTPVDELAKNIINLFTFTSLGAPAAFKFFDKSVDRKRYTSTKEVLDSTLIHQSITGLYETRIDLGKLGED

SEQ ID NO: 1174 - protein, 1378 aa, Streptococcus agalactiae
MNKPYSIGLDIGTNSVGWSIITDDYKVPAKKMRVLGNTDKEYIKKNLIGALLFDGGNTAADRRLKRTARRRYTRRRNRILYLQEIFAEEMSKVDDSFFHRLEDSFLVEEDKRGSKYPIFATMQEEKYYHEKFPTIYHLRKELADKKEKADLRLIYLALAHIIKFRGHFLIEDDRFDVRNTDIQKQYQAFLEIFDTTFENNDLLSQNVDVEAILTDKISKSAKKDRILARYPNQKSTGIFAEFLKLIVGNQADFKKHFNLEDKTPLQFAKDSYDEDLENLLGQIGDEFADLFSAAKKLYDSVLLSGILTVIDLSTKAPLSASMIQRYDEHHEDLKHLKQFVKASLPENYREVFADSSKDGYAGYIEGKTSQEAFYKYLLKLLTKQEGSEYLLEKIKNEDFLRKQRTFDNGSIPHQVHLTELRAIIRRQSEYYPFLKENLDRIEKILTFRIPYYVGPLAREKSDFAWMTRKTDDSIRPWNFEDLVDKEKSAEAFIHRMTNNDLYLPEEKVLPKHSLIYEKFTVYNELTKVRFLAEGFKDFQFLNRKQKETIFNSLFKEKRKVTEKDIISFLNKVDGYEGIAIKGIEKQFNASLSTYHDLKKILGKDFLDNTDNELILEDIIQTLTLFEDREMIKKRLDIYKDFFTESQLKKLYRRHYTGWGRLSAKLINGIRNKENQKTILDYLIDDGSANRNFMQLIKDAGLSFKPIIDKARTGSHSDNLKEVVGELAGSPAIKKGILQSLKIVDELVKVMGYEPEQIVVEMARENQTTAKGLSRSRQRLTTLRESLGNLKSNILEEKKPKYVKDQVENHHLSDDRLFLYYLQNGKDMYTDDELDIDNLSQYDIDHIIPQAFIKDDSIDNRVLVSSAKNRGKSDDVPSIEIVKARKMFWKNLLDAKLMSQRKYDNLTKAERGGLTSDDKARFIQRQLVETRQITKHVARILDERFNNELDSKGRRIRKVKIVTLKSNLVSNFRKEFGFYKIREVNNYHHAHDAYLNAVVAKAILTKYPQLEPEFVYGLYRRKKLSKIVREDKEEKYSEATRKMFFYSNLMNMFKRVVRLADGSIVVRPVIETGRYMGKTAWDKKKHFATVRKVLSYPQNNIVKKTEIQTGGFSKESILAHGNSDKLIPRKTKDIYLDPKKYGGFDSPIVAYSVLVVADIKKGKAQKLKTVTELLGITIMERSRFEKNTSAFLESKGYLNIRDDKLMILPKYSLFELENGRRRLLASAGELQKGNELALPTQFMKFLYLASRYNESKGKPEEIEKKQEFVNQHVSYFDDILQLINDFSNRVILADANLEKINKLYQDNKENIPVDELANNIINLFTFTSLGAPAAFKFFDKIVDRKRYTSTKEVLNSTLIHQSITGLYETRIDLGKLGEG

SEQ ID NO: 1175 - protein, 1370 aa, Streptococcus agalactiae
MNKPYSIGLDIGTNSVGWSIITDDYKVPAKKMRVLGNTDKEYIKKNLIGALLFDGGNTAADRRLKRTARRRYTRRRNRILYLQEIFAEEMSKVDDSFFHRLEDSFLVEEDKRGSKYPIFATMQEEKYYHEKFPTIYHLRKELADKKEKADLRLIYLALAHIIKFRGHFLIEDDRFDVRNTDIQKQYQAFLEIFDTTFENNDLLSQNVDVEAILTDKISKSAKKDRILARYPNQKSTGIFAEFLKLIVGNQADFKKHFNLEDKTPLQFAKDSYDEDLENLLGQIGDEFADLFSAAKKLYDSVLLSGILTVTDLSTKAPLSASMIQRYDEHREDLKQLKQFVKASLPEKYQEIFADSSKDGYAGYIEGKTNQEAFYKYLSKLLTKQEGSEYLLEKIKNEDFLRKQRTFDNGSIPHQVHLTELRAIIRRQSEYYPFLKENLDRIEKILTFRIPYYVGPLAREKSDFAWMTRKTDDSIRPWNFEDLVDKEKSAEAFIHRMTNNDLYLPEEKVLPKHSLIYEKFTVYNELTKVRFLAEGFKDFQFLNRKQKETIFNSLFKEKRKVTEKDIISFLNKVDGYEGIAIKGIEKQFNASLSTYHDLKKILGKDFLDNTDNELILEDIVQTLTLFEDREMIRKRLDIYKDFFTESQLKKLYRRHYTGWGRLSAKLINGIRNKENQKTILDYLIDDGSANRNFMQLIKDAGLSFKPIIDKARTGSHSDNLKEVVGELAGSPAIKKGILQSLKIVDELVKVMGYEPEQIVVEMARENQTTAKGLSRLRQRLTTLRESLANLKSNILEEKKPKYVKDQVENHHLSDDRLFLYYLQNGKDMYTDDELDIDNLSQYDIDHIIPQAFIKDDSIDNRVLVSSAKNRGKSDDVPSVEIVKDCKVFWKKLLDAKLMSQRKYDNLTKAERGGLTSDDKARFIQRQLVETRQITKHVARILDERFNNELDSKGRRIRKVKIVTLKSNLVSNFRKEFGFYKIREVNNYHHAHDAYLNAVVAKAILTKYPQLEPEFVYGDYPKYNSYKTRKSATEKLFFYSNIMNFFKTKVTLADGTVVVKDDIEVNNDTGEIVWDKKKHFATVRKVLSYPQVNIVKKTEIQTGGFSKESILAHGNSDKLIPRKTKDIYLDPKKYGGFDSPIVAYSVLVVADIKKGKAQKLKTVTELLGITIMERSRFEKNPSAFLESKGYLNIRDDKLMILPKYSLFELENGRRRLLASADELQKGNELALPTQFMKFLYLASRYNELKGKPEEIEQKQEFVVQHVSYFDDILQIINDFSNRVILADANLEKINKLYQDNKENIPVDELANNIINLFTFTSLGAPAAFKFFDKIVDRKRYTSTKEVLNSTLIHQSITGLYETRIDLGKLGED

SEQ ID NO: 1176 - protein, 1377 aa, Streptococcus agalactiae
MNKPYSIGLDIGTNSVGWSIITDDYKVPAKKMRVLGNTDKEYIKKNLIGALLFDGGNTAADRRLKRTARRRYTRRRNRILYLQEIFAEEMSKVDDSFFHRLEDSFLVEEDKRGSKYPIFATMQEEKYYHEKFPTIYHLRKELADKKEKADLRLVYLALAHIIKFRGHFLIEDDRFDVRNTDIQKQYQAFLEIFDTTFENNHLLSQNVDVEAILTDKISKSAKKDRILAQYPNQKSTGIFAEFLKLIVGNQADFKKHFNLEDKTPLQFAKDSYDEDLENLLGQIGDEFADLFSVAKKLYDSVLLSGILTVTDLSTKAPLSASMIQRYDEHHEDLKHLKQFVKASLPENYREVFADSSKDGYAGYIEGKTNQEAFYKYLLKLLTKQEGSEYFLEKIKNEDFLRKQRTFDNGSIPHQVHLTELRAIIRRQSEYYPFLKENQDRIEKILTFRIPYYVGPLAREKSDFAWMTRKTDDSIRPWNFEDLVDKEKSAEAFIHRMTNNDLYLPEEKVLPKHSLIYEKFTVYNELTKVRFLAEGFKDFQFLNRKQKETIFNSLFKEKRKVTEKDIISFLNKVDGYEGIAIKGIEKQFNASLSTYHDLKKILGKDFLDNTDNELILEDIVQTLTLFEDREMIKKCLDIYKDFFTESQLKKLYRRHYTGWGRLSAKLINGIRNKENQKTILDYLIDDGSANRNFMQLINDDDLSFKPIIDKARTGSHSDNLKEVVGELAGSPAIKKGILQSLKIVDELVKVMGYEPEQIVVEMARENQTTAKGLSRSRQRLTTLRESLANLKSNILEEKKPKYVKDQVENHHLSDDRLFLYYLQNGRDMYTKKALDIDNLSQYDIDHIIPQAFIKDDSIDNRVLVSSAKNRGKSDDVPSIEIVKARKMFWKNLLDAKLMSQRKYDNLTKAERGGLTSDDKARFIQRQLVETRQITKHVARILDERFNNEVDNGKKICKVKIVTLKSNLVSNFRKEFGFYKIREVNDYHHAHDAYLNAVVAKAILTKYPQLEPEFVYGMYRQKKLSKIVHEDKEEKYSEATRKMFFYSNLMNMFKRVVRLADGSIVVRPVIETGRYMGKTAWDKKKHFATVRKVLSYPQNNIVKKTEIQTGGFSKESILAHGNSDKLIPRKTKDIYLDPKKYGGFDSPIVAYSVLVVADIKKGKAQKLKTVTELLGITIMERSRFEKNPSAFLESKGYLNIRDDKLMILPKYSLFELENGRRRLLASAGELQKGNELALPTQFMKFLYLASRYNESKGKPEEIEKKQEFVNQHVSYFDDILQLINDFSKRVILADANLEKINKLYQDNKENIPVDELANNIINLFTFTSLGAPAAFKFFDKIVDRKRYTSTKEVLNSTLIHQSITGLYETRIDLGKLGED

SEQ ID NO: 1177 - protein, 1370 aa, Streptococcus agalactiae
  VARIANT 117: note = MOD_RES - Any naturally occurring amino acid
MNKPYSIGLDIGTNSVGWSIITDDYKVPAKKMRVLGNTDKEYIKKNLIGALLFDGGNTAADRRLKRTARRRYTRRRNRILYLQEIFAEEMSKVDDSFFHRLEDSFLVEEDKRGSKYXIFATLQEEKDYHEKFSTIYHLRKELADKKEKADLRLIYIALAHIIKFRGHFLIEDDSFDVRNTDISKQYQDFLEIFNTTFENNDLLSQNVDVEAILTDKISKSAKKDRILAQYPNQKSTGIFAEFLKLIVGNQADFKKYFNLEDKTPLQFAKDSYDEDLENLLGQIGDEFADLFSAAKKLYDSVLLSGILTVIDLSTKAPLSASMIQRYDEHREDLKQLKQFVKASLPEKYQEIFADSSKDGYAGYIEGKTNQEAFYKYLSKLLTKQEDSENFLEKIKNEDFLRKQRTFDNGSIPHQVHLTELKAIIRRQSEYYPFLKENQDRIEKILTFRIPYYIGPLAREKSDFAWMTRKTDDSIRPWNFEDLVDKEKSAEAFIHRMTNNDFYLPEEKVLPKHSLIYEKFTVYNELTKVRYKNEQGETYFFDSNIKQEIFDGVFKEHRKVSKKKLLDFLAKEYEEFRIVDVIGLDKENKAFNASLGTYHDLEKILDKDFLDNPDNESILEDIVQTLTLFEDREMIKKRLENYKDLFTESQLKKLYRRHYTGWGRLSAKLINGIRDKESQKTILDYLIDDGRSNRNFMQLINDDGLSFKSIISKAQAGSHSDNLKEVVGELAGSPAIKKGILQSLKIVDELVKVMGYEPEQIVVEMARENQTTNQGRRNSRQRYKLLDDGVKNLASDLNGNILKEYPTDNQALQNERLFLYYLQNGRDMYTGEALDIDNLSQYDIDHIIPQAFIKDDSIDNRVLVSSAKNRGKSDDVPSLEIVKDCKVFWKKLLDAKLMSQRKYDNLTKAERGGLTSDDKARFIQRQLVETRQITKHVARILDERFNNELDSKGRRIRKVKIVTLKSNLVSNFRKEFGFYKIREVNNYHHAHDAYLNAVVAKAILTKYPQLEPEFVYGDYPKYNSYKTRKSATEKLFFYSNIMNFFKTKVTLADGTVVVKDDIEVNNDTGEIVWDKKKHFATVRKVLSYPQNNIVKKTEIQTGGFSKESILAHGNSDKLIPRKTKDIYLDPKKYGGFDSPIVAYSVLVVADIKKGKAQKLKTVTELLGITIMERSRFEKNPSAFLESKGYLNIRADKLIILPKYSLFELENGRRRLLASAGELQKGNELALPTQFMKFLYLASRYNESKGKPEEIEKKQEFVNQHVSYFDDILQLINDFSKRVILADANLEKINKLYQDNKENISVDELANNIINLFTFTSLGAPAAFKFFDKIVDRKRYTSTKEVLNSTLIHQSITGLYETRIDLGKLGED

SEQ ID NO: 1178 - protein, 1370 aa, Streptococcus agalactiae
MNKPYSIGLDIGTNSVGYSVVTDDYKVPAKKMRVLGNTDKEYIKKNLIGALLFDGGNTASDRRLKRTARRRYTRRRNRILYLQEIFAEEMSKVDDSFFHRLEDSFLVEDDKRGSKYPIFATMQEEKDYHEKFPTIYHLRKELADKKEKADLRLVYLALAHIIKFRGHFLIEDDSFDVRNTDIQRQYQAFLEIFDTTFENNHLLSQNIDVEGILTDKISKSAKKDRILAQYPNQKSTGIFAEFLKLIVGNQADFKKHFNLEDKTPLQFAKDSYDEDLENLLGQIGDEFADLFSVAKKLYDSVLLSGILTVTDLSTKAPLSASMIQRYDEHREDLKQLKQFVKASLPEKYQEIFTDSSKDGYAGYIEGKTNQGAFYKYLSKLLTKQEGSEYFLEKIKNEDFLRKQRTFDNGSIPHQVHLTELKAIIRRQSEYYPFLKENLDRIEKILTFRIPYYVGPLAREKSDFAWMTRKTDDSIRPWNFEELVDKEASAEAFIHRMTNNDLYLPEEKVLPKHSLIYEKFTVYNELTKVRYKNEQGETYFFDSNIKQEIFDGVFKEHRKVSKKKLLDFLAKEYEEFRIVDVIGLDKENKAFNASLGTYHDLKKILDKDFLDNPDNESILEDIVQTLTLFEDREMIKKRLENYKDLFTESQLKKLYRRHYTGWGRLSAKLINGIRDKESQKTILDYLISDGRANRNFMQLIHDDGLSFKPIIDKAQAGSHSDNLKEVVGELAGSPAIKKGILQSLKIVDELVKVMGYEPEQVVVEMARENQTTNQGRRNTRQRYKLLEEGVKNLASDLNGNILKEYPTDNQALQNERLFLYYLQNGRDMYTGEALDIDNLSQYDIDHIVPQAFIKDDSIDNRVLVSSAKNRGKSDNVPSIDIVKARKAFWKKLLDAKLMSQRKYDNLTKAERGGLTSDDKARFIQRQLVETRQITKHVARILDERFNNELDSKGRRIRKVKIVTLKSNLVSNFRKEFGFYKIREVNDYHHAHDAYLNAVVAKAILTKYPQLEPEFVYGDYPKYNSYKTRKSATEKLFFYSNIMNFFKTKVTLADGTVVVKDDIEVNNDTGEIVWDKKKHFATVRKVLSYPQVNIVKKTEIQTGGFSKESILAHGNSDKLIPRKTKDIYLDPKKYGGFDSPIVAYSVLVVADIKKGKAQKLKTVTELLGITIMERFRFEKNPSAFLESKGYLNIRDDKLMILPKYSLFELENGRRRLLASAGELQKGNELALPTQYMKFLYLASRYNELKGKPEEIEQKQEFVVQHVSYFDDILQIINDFSNRVILADANLEKINKLYQDNKENISVDELANNIINLFTFTSLGAPAAFKFFDKIVDRKRYTSTKEVLNSTLIHQSITGLYETRIDLGKLGED

SEQ ID NO: 1179 - protein, 1370 aa, Streptococcus agalactiae
MNKPYSIGLDIGTNSVGYSVVTDDYKVPAKKMRVLGNTDKEYIKKNLIGALLFDGGNTASDRRLKRTARRRYTRRRNRILYLQEIFAEEMSKVDDSFFHRLEDSFLVEDDKRGSKYPIFATMQEEKDYHEKFPTIYHLRKELADKKEKANLRLVYLALAHIIKFRGHFLIEDDSFDVRNTDIQRQYQAFLEIFDTTFENNHLLSQNIDVEGILTDKISKSAKKDRILAQYPNQKSTGIFAEFLKLIVGNQADFKKHFNLEDKTPLQFAKDSYDEDLENLLGQIGDEFADLFSVAKKLYDSVLLSGILTVTDLSTKAPLSASMIQRYDEHREDLKQLKQFVKASLPEKYQEIFTDSSKDGYAGYIEGKTNQGAFYKYLSKLLTKQEGSEYFLEKIKNEDFLRKQRTFDNGSIPHQVHLTELKAIIRRQSEYYPFLKENLDRIEKILTFRIPYYVGPLAREKSDFAWMTRKTDDSIRPWNFEELVDKEASAEAFIHRMTNNDLYLPEEKVLPKHSLIYEKFTVYNELTKVRYKNEQGETYFFDSNIKQEIFDGVFKEHRKVSKKKLLDFLAKEYEEFRIVDVIGLDKENKAFNASLGTYHDLKKILDKDFLDNPDNESILEDIVQTLTLFEDREMIKKRLENYKDLFTESQLKKLYRRHYTGWGRLSAKLINGIRDKESQKTILDYLISDGRANRNFMQLIHDDGLSFKPIIDKAQAGSHSDNLKEVVGELAGSPAIKKGILQSLKIVDELVKVMGYEPEQVVVEMARENQTTNQGRRNTRQRYKLLEEGVKNLASDLNGNILKEYPTDNQALQNERLFLYYLQNGRDMYTGEALDIDNLSQYDIDHIVPQAFIKDDSIDNRVLVSSAKNRGKSDNVPSIDIVKARKAFWKKLLDAKLMSQRKYDNLTKAERGGLTSDDKARFIQRQLVETRQITKHVARILDERFNNELDSKGRRIRKVKIVTLKSNLVSNFRKEFGFYKIREVNDYHHAHDAYLNAVVAKAILTKYPQLEPEFVYGDYPKYNSYKTRKSATEKLFFYSNIMNFFKTKVTLADGTVVVKDDIEVNNDTGEIVWDKKKHFATVRKVLSYPQVNIVKKTEIQTGGFSKESILAHGNSDKLIPRKTKDIYLDPKKYGGFDSPIVAYSVLVVADIKKGKAQKLKTVTELLGITIMERFRFEKNPSAFLESKGYLNIRDDKLMILPKYSLFELENGRRRLLASAGELQKGNELALPTQYMKFLYLASRYNELKGKPEEIEQKQEFVVQHVSYFDDILQIINDFSNRVILADANLEKINKLYQDNKENISVDELANNIINLFTFTSLGAPAAFKFFDKIVDRKRYTSTKEVLNSTLIHQSITGLYETRIDLGKLGED

SEQ ID NO: 1180 - protein, 1370 aa, Streptococcus agalactiae
  VARIANT 9: note = MOD_RES - Any naturally occurring amino acid
MNKPYSIGXDIGTNSVGWSIITDDYKVPAKKMRVLGNTDKEYIKKNLIGALLFDGGNTAADRRLKRTARRRYTRRRNRILYLQEIFAEEMSKVDDSFFHRLEDSFLVEEDKRGSKYPIFATLQEEKDYHEKFSTIYHLRKELADKKEKADLRLIYIALAHIIKFRGHFLIEDDSFDVRNTDISKQYQDFLEIFNTTFENNDLLSQNVDVEAILTDKISKSAKKDRILAQYPNQKSTGIFAEFLKLIVGNQADFKKYFNLEDKTPLQFAKDSYDEDLENLLGQIGDEFADLFSAAKKLYDSVLLSGILTVIDLSTKAPLSASMIQRYDEHREDLKQLKQFVKASLPEKYQEIFADSSKDGYAGYIEGKTNQEAFYKYLSKLLTKQEDSENFLEKIKNEDFLRKQRTFDNGSIPHQVHLTELKAIIRRQSEYYPFLKENQDRIEKILTFRIPYYIGPLAREKSDFAWMTRKTDDSIRPWNFEDLVDKEKSAEAFIHRMTNNDFYLPEEKVLPKHSLIYEKFTVYNELTKVRYKNEQGETYFFDSNIKQEIFDGVFKEHRKVSKKKLLDFLAKEYEEFRIVDVIGLDKENKAFNASLGTYHDLEKILDKDFLDNPDNESILEDIVQTLTLFEDREMIKKRLENYKDLFTESQLKKLYRRHYTGWGRLSAKLINGIRDKESQKTILDYLIDDGRSNRNFMQLINDDGLSFKSIISKAQAGSHSDNLKEVVGELAGSPAIKKGILQSLKIVDELVKVMGYEPEQIVVEMARENQTTNQGRRNSRQRYKLLDDGVKNLASDLNGNILKEYPTDNQALQNERLFLYYLQNGRDMYTGEALDIDNLSQYDIDHIIPQAFIKDDSIDNRVLVSSAKNRGKSDDVPSLEIVKDCKVFWKKLLDAKLMSQRKYDNLTKAERGGLTSDDKARFIQRQLVETRQITKHVARILDERFNNELDSKGRRIRKVKIVTLKSNLVSNFRKEFGFYKIREVNNYHHAHDAYLNAVVAKAILTKYPQLEPEFVYGDYPKYNSYKTRKSATEKLFFYSNIMNFFKTKVTLADGTVVVKDDIEVNNDTGEIVWDKKKHFATVRKVLSYPQNNIVKKTEIQTGGFSKESILAHGNSDKLIPRKTKDIYLDPKKYGGFDSPIVAYSVLVVADIKKGKAQKLKTVTELLGITIMERSRFEKNPSAFLESKGYLNIRADKLIILPKYSLFELENGRRRLLASAGELQKGNELALPTQFMKFLYLASRYNESKGKPEEIEKKQEFVNQHVSYFDDILQLINDFSKRVILADANLEKINKLYQDNKENISVDELANNIINLFTFTSLGAPAAFKFFDKIVDRKRYTSTKEVLNSTLIHQSITGLYETRIDLGKLGED

SEQ ID NO: 1181 - protein, 1125 aa, Streptococcus anginosus
MNGLVLGLDIGIASVGVGILNKETGEIIHANSRIFPAATADSNVERRGFRQGRRLGRRKKHRSARLNNLFEEFGFITDFSAIPLNLNPYALRVKGLSEELTNEELFIALKNIIKRRGISYLDDASEDGETASNEYGKAVEENRKLLADKTPGQIQLERFEKYGQVRGDFTVVENGENHRLINVFSTSAYKKEAERILRRQQEFNVRISDEFIEAYLTILTGKRKYYHGPGNEKSRTDYGRFRTDGTTLDNIFGILIGKCTFYPDEYRAAKASYTAQEFNLLNDLNNLTVPTETKKLSPEQKRQIVEYARTAKTLGTPTLLKYIAKLVDGSIDDIKGYRIDKSDKPEMHTFDAYRKMRTLDLVNIDALSRETLDDLAHILTLNTESEGILEALNSKMPSTFTKEQIDELIQFRKKNSAVFGKGWHNFSLKLMNELISELYETSEEQMTILTRLGKQRSREISKRTKYIDEKELTEEIYNPVVAKSVRQAIKIINEATKRYGIFDNIVIEMARENNEEDAKKDYIKRQKANQDEKNASMEKAAFQYNGKKELPDSIFHGHKELATKIRLWHQQGERCLYTGKNISIRDLIHNPHQYEIDHILPLSLSFDDGLANKVLVLATANQEKGQRTPFQAIDSMDDAWSYREFKQYVRNSKSLSNKKKDYLLTEEDISKIEVKQKFIERNLVDTRYSSRVVLNTLQEFYKTNDFDTKISVVRGQFTSQLRRKWKIEKSRDTYHHHAVDALIIAASSQLRLWKKQNNPLISYKEGQFVDPETGEILSLTDDEYKELVFRPPYDYFVDTLKSKSFEDSILFSYQVDSKYNRKISDATIYGTRKAQLGKDKQEETYVLGKIKDIYSQKGYEDFIKRYNKDETQFLIYHKDPQTFEKVIEEILKTYPDKELNEKGKEIPCNPFEKYRQENGPIRKYSKKGKGPEIKSLKYYDNKLGNHIDITPVNSQNQVVLQSLKPWRTDVYFNPRTSKYELMGLKYSDLRFEKGSGSYGISPEKYNKVKAKEGVNEDSEFKFTLYKNDLILIKDTETGEQQLFRYGSRNDTSKHYVELKPYEKAKFEGNQQLMNLLGTVAKGGQCLKGINKPNLSIYKVKTDVLGNKYFIKKEGDQPQLNFKKKF

SEQ ID NO: 1182 - protein, 1386 aa, Streptococcus anginosus
MNQKYSIGLDIGTNSVGWAVITDDYKVPAKKMKVLGNTDKQSIKKNLLGALLFDSGETAEATRLKRTARRRYTRRRNRLRYLQEIFAEEMMQVDESFFQRLDDSFLVDEDKRGERHPIFGNIAAEVKYHDEFPTIYHLRKHLADISQKADLRLVYLALAHMIKFRGHFLIEGQLKAENTNVQALFKDFVEVYDKTVEESHLSEITVDALSILTEKVSKSRRLENLIAHYPAEKKNTLFGNLIALFLGLQPNFKTNFQLSEDAKLQFSKDTYEEDLEGLLGEVGDEYADLFASAKNLYDAILLSGILTVDDNSTKAPLSASMVKRYEEHQKDLKKFEDFIKVNALDQYNAIFKDKNKKGYAGYIESGVKQDEFYKYLKGILLQINGSGDFLDKIDREDFLRKQRTFDNGSIPHQIHLQEMHAILRRQGEHYPFLKENQDKIEKILTFRIPYYVGPLARKGSRFAWAEYKADEKITPWNFDDILDKEKSAEKFITRMTLNDLYLPEEKVLPKHSLLYETFTVYNELTKVKYVNEQGEAKFFDANMKQEIFDHVFKENRKVTKDKLLNYLNKEFEEFRIVNLTGLDKENKVFNSSLGTYHDLRKILNKSFLDNKENAQIIEDIIQTLTLFEDREMIRQRLQKYSDIFTKAQLKKLERRHYTGWGRLSYKLINGIRNKENKKTILDYLIDDGYANRNFMQLINDDALSFKEEIAKAQIIGDVDDIANVVHDLPGSPAIKKGILQSVKIVDELVKVMGHNPANIIIEMARENQTTDRGRRNSQQRLKLLQDSLKNLDNPVNIKNVENQQLQNDRLFLYYIQNGKDMYTGETLDINNLSQYDIDHIIPQAYIKDDSFDNRVLTSSSENRGKSDNVPSIEVVCARKADWMRLRKAGLISQRKFDNLTKAERGGLTENDKAGFIKRQLVETRQITKHVAQVLDARFNAKHDENKKVIRDVKIITLKSNLVSQFRKDFKFYKVREINDYHHAHDAYLNAVIGTALLKKYPKLASEFVYGEFKKYDVRKFIAKSDKEIGKATAKYFFYSNLMNFFKKEVKFADGTVVERPDIETSEDGEIAWNKQTDFKIVRKVLSYPQVNIVKKTEVQTHGLDRGKPRGLFNANPSPKPKPDSSENLVGVKRNLDPKKYGGYAGISNSYAVLVKAIIEKGVKKKETMVLEFQGISILDRITFEKDKRAFLLGKGYKDIKKIIELPKYSLFELKDGSRRMLASILSTNNKRGEIHKGNELFVPQKFTTLLYHAKRINNPINKDHIEYVKKHRDDFKELLNYVLEFNEKYVGATKNGERLKEAVADFDSKSNEEICTSFLGAVNSKNAGLFELTSLGSASDFEFLGVKIPRYRDYTPSSLLKDSTLIHQSITGLYETRIDLSKLGED

SEQ ID NO: 1183 - protein, 1396 aa, Streptococcus anginosus
MTKPYSIGLDIGTNSVGWAVITDDYKVPAKKMKVLGNTNRDYIKKNLLGALLFDGGETAEGRRLKRTARRRYTRRKNRLRYLQEIFAEEMMQVDESFFQRLDDSFLVEEDKQGSKYPIFGTLKEEKEYHKKFKTIYHLREELANSKEKADLRLVYLALAHMIKFRGHFLYEGDLKAENTDVQALFKDFVEEYDKTIEESHLSEITVDALSILTEKVSKSSRLENLIAHYPTEKKNTLFGNLIALSLGLQANFKTNFQLSEDAKLQFSKDTYEEDLEGLLGEVGDEYADLFVSAKNLYDAILLSGILTVDDNSTKAPLSASMVKRYKEHKEELAAFKRFIKEKLPKKYEEIFKDDTKNGYAGYVGADKKLRKRSGKLATEEEFYKYVKGILNKVEGADYFLDKIDREDFLRKQRTFDNGSIPHQIHLQEMHAILRRQGEHYPFLKENQDKIEKILTFRIPYYVGPLARKGSRFAWAEYKADEKITPWNFDDILDKEKSAEKFITRMTLNDLYLPEEKVLPKHSPLYETFTVYNELTKVKYVNEQGEAKFFDTNMKQEIFDHVFKENRKVTKDKLLNYLNKEFEEFRIVNLTGLDKENKAFNASLGTYHDLRKILDKSFLDDKVNEKIIEDIIQTLTLFEDREMIRQRLQKYSDIFTTQQLKELERRHYTGWGRLSYKLINGIRNKENKKTILDYLIDDGYANRNFMQLINDDALSFKEEIARAQIIGDVDDIANVVHDLPGSPAIKKGILQSVKIVDELVKVMGHNPTNIIIEMARENQTTDKGRRNSQQRLKLLQDSLKNLDNPVNIKNVENQQLQNDRLFLYYIQNGKDMYTGETLDINNLSQYDIDHIIPQAFIKDNSLDNRVLTRSDKNRGKSDDVPSIEVVHEMKSFWSKLLSVKLITQRKFDNLTKAERGGLTENDKAGFIKRQLVETRQITKHVAQVLDARFNAKHDENKKVIRDVKIITLKSNLVSQFRKDFKFYKVREINDYHHAHDAYLNAVIGTALLKKYPKLASEFVYGEFKKYDVRKFIAKSDKEIGKATAKYFFYSNLMNFFKKEVKFADGTVVERPDIETSEDGEIAWNKQTDFKIVRKVLSYPQVNIVKKTEVQTHGLDRGKPRGLFNANPSPKPKPDSSENLVGIKRNLDPKKYGGYAGISNSYAVLVKAIIEKGVKKKETMVLEFQGISILDRITFEKDKRAFLLGKGYKDIKKIIELPKYSLFELKDGSRRMLASILSTNNKRGEIHKGNELFVPQKFTTLLYHAKRINNPINKDHIEYVKKHRDDFKELLNYVLEFNEKYVGATKNGERLKEAVADFDSKSNEEICTSFLGAVNSKNAGLFELTSLGSASDFEFLGVKIPRYRDYTPSSLLKDSILIHQSITGLYETRIDLSKLGED

SEQ ID NO: 1184 - protein, 1375 aa, Streptococcus canis
MEKKYSIGLDIGTNSVGWAVITDDYKVPSKKFKVLGNTNRKSIKKNLMGALLFDSGETAEATRLKRTARRRYTRRKNRIRYLQEIFANEMAKLDDSFFQRLEESFLVEEDKKNERHPIFGNLADEVAYHRNYPTIYHLRKKLADSPEKADLRLIYLALAHIIKFRGHFLIEGKLNAENSDVAKLFYQLIQTYNQLFEESPLDEIEVDAKGILSARLSKSKRLEKLIAVFPNEKKNGLFGNIIALALGLTPNFKSNFDLTEDAKLQLSKDTYDDDLDELLGQIGDQYADLFSAAKNLSDAILLSDILRSNSEVTKAPLSASMVKRYDEHHQDLALLKTLVRQQFPEKYAEIFKDDTKNGYAGYVGIGIKHRKRTTKLATQEEFYKFIKPILEKMDGAEELLAKLNRDDLLRKQRTFDNGSIPHQIHLKELHAILRRQEEFYPFLKENREKIEKILTFRIPYYVGPLARGNSRFAWLTRKSEEAITPWNFEEVVDKGASAQSFIERMTNFDEQLPNKKVLPKHSLLYEYFTVYNELTKVKYVTERMRKPEFLSGEQKKAIVDLLFKTNRKVTVKQLKEDYFKKIECFDSVEIIGVEDRFNASLGTYHDLLKIIKDKDFLDNEENEDILEDIVLTLTLFEDREMIEERLKTYAHLFDDKVMKQLKRRHYTGWGRLSRKMINGIRDKQSGKTILDFLKSDGFSNRNFMQLIHDDSLTFKEEIEKAQVSGQGDSLHEQIADLAGSPAIKKGILQTVKIVDELVKVMGHKPENIVIEMARENQTTTKGLQQSRERKKRIEEGIKELESQILKENPVENTQLQNEKLYLYYLQNGRDMYVDQELDINRLSDYDVDHIVPQSFIKDDSIDNKVLTRSVENRGKSDNVPSEEVVKKMKNYWRQLLNAKLITQRKFDNLTKAERGGLSEADKAGFIKRQLVETRQITKHVARILDSRMNTKRDKNDKPIREVKVITLKSKLVSDFRKDFQLYKVRDINNYHHAHDAYLNAVVGTALIKKYPKLESEFVYGDYKVYDVRKMIAKSEQEIGKATAKRFFYSNIMNFFKTEVKLANGEIRKRPLIETNGETGEVVWNKEKDFATVRKVLAMPQVNIVKKTEVQTGGFSKESILSKRESAKLIPRKKGWDTRKYGGFGSPTVAYSILVVAKVEKGKAKKLKSVKVLVGITIMEKGSYEKDPIGFLEAKGYKDIKKELIFKLPKYSLFELENGRRRMLASATELQKANELVLPQHLVRLLYYTQNISATTGSNNLGYIEQHREEFKEIFEKIIDFSEKYILKNKVNSNLKSSFDEQFAVSDSILLSNSFVSLLKYTSFGASGGFTFLDLDVKQGRLRYQTVTEVLDATLIYQSITGLYETRTDLSQLGGD

SEQ ID NO: 1185 - protein, 1345 aa, Streptococcus constellatus
MGKPYSIGLDIGTNSVGWAVVTDDYKVPAKKMKVLGNTDKQSIKKNLLGALLFDSGETAEATRLKRTARRRYTRRKNRLRYLQEIFTGEMNKVDENFFQRLDDSFLVDEDKRGEHHPIFGNIAAEVKYHDDFPTIYHLRRHLADTSKKADLRLVYLALAHMIKFRGHFLYEGDLKAENTDVQALFKDFVEEYDKTIEESHLSEITVDALSILTEKVSKSSRLENLIAHYPTEKKNTLFGNLIALSLDLHPNFKTNFQLSEDAKLQFSKDTYEEDLEGFLGEVGDEYADLFASAKNLYDAILLSGILTVDDNSTKAPLSASMVKRYEEHQKDLKKLKDFIKVNAPDQYNAIFKDKNKKGYASYIESGVKQDEFYKYLKGILLKINGSGDFLDKIDREDFLRKQRTFDNGSIPHQIHLQEMHAILRRQGEHYPFLKENQDKIEKILTFRIPYYVGPLARKGSRFAWAEYKADEKITPWNFDDILDKEKSAEKFITRMTLNDLYLPEEKVLPKHSPLYEAFTVYNELTKVKYVNEQGEAKFFDTNMKQEIFDHVFKENRKVTKDKLLNYLNKEFEEFRIVNLTGLDKENKAFNSSLGTYHDLRKILDKSFLDDKANEKTIEDIIQTLTLFEDREMIRQRLQKYSDIFTKAQLKKLERRHYTGWGRLSYKLINGIRNKENKKTILDYLIDDGYANRNFMQLINDDALSFKEEIARAQIIDDVDDIANVVHDLPGSPAIKKGILQSVKIVDELVKVMGHNPANIIIEMARENQTTDKGRRNSQQRLKLLQDSLKNLDNPVNIKNVENQQLQNDRLFLYYIQNGKDMYTGETLDINNLSQYDIDHIIPQAFIKDNSLDNRVLTRSDKNRGKSDDVPSIEVVHEMKSFWSKLLSVKLITQRKFDNLTKAERGGLTEEDKAGFIKRQLVETRQITKHVAQILDERFNTEFDGNKRRIRNVKIITLKSNLVSNFRKEFELYKVREINDYHHAHDAYLNAVVGNALLLKYPQLEPEFVYGEYPKYNSYRSRKSATEKFLFYSNILRFFKKEDIQTNEDGEIAWNKEKHIKILRKVLSYPQVNIVKKTEEQTGGFSKESILPKGESDKLIPRKTKNSYWDPKKYGGFDSPVVAYSILVFADVEKGKSKKLRKVQDMVGITIMEKKRFEKNPVDFLEQRGYRNVRLEKIIKLPKYSLFELENKRRRLLASAKELQKGNELVIPQRFTTLLYHSYRIEKDYEPEHREYVEKHKDEFKELLEYISVFSRKYVLADNNLTKIEMLFSKNKDAEVSSLAKSFISLLTFTAFGAPAAFNFFGENIDRKRYTSVTECLNATLIHQSITGLYETRIDLSKLGED

SEQ ID NO: 1186 - protein, 538 aa, Streptococcus dysgalactiae
DYDVDHIVPQSFIKDDSIDNKVLTRSDKNRGKSDNVPSEEVVKKMKNYWRQLLNAKLITQRKFDNLTKAERGGLSELDKAGFIKRQLVETRQITKHVAQILDSRMNTKYDENDKLIREVKVITLKSKLVSDFRKDFQFYKVREINNYHHAHDAYLNAVVGTALIKKYPKLESEFVYGDYKVYDVRKMIAKSEQEIGKATAKRFFYSNIMNFFKTEITLANGEIRKRPLIETNEETGEIVWDKGRDFATVRKVLSMPQVNIVKKTEVQTGALTNESIYARGSFDKLISRKHRFESSKYGGFGSPTVTYSVLVVAKSKVQDGKVKKIKTGKELIGITLLDKLVFEKNPLKFIEDKGYGNVQIDKCIRLPKYSLFEFENGTRRMLASVMANNNSRGDLQKANEMFLPAKLVTLLYHAHKIESSKELEHEAYILDHYNDLYQLLSYIERFASLYVDVEKNISKVKELFSNIESYSISEICSSVINLLTLTASGAPADFKFLGTTIPRKRYGSPQSILSSTLIHQSITGLYETRIDLSQLGGD

SEQ ID NO: 1187 - protein, 1155 aa, Streptococcus dysgalactiae
MDKKYSIGLDIGTNSVGWAVITDDYKVPSKKFKVLGNTDRHSIKKNLIGALLFDSGETAEATRLKRSARRRYTRRKNRIRYLQEIFSSEMSKVDDSFFHRLEESFLVEEDKKHERHPIFGNIVDEVAYHEKYPTIYHLRKKLADSTDKADLRLIYLALAHMIKFRGHFLIEGDLNPDNSDMDKLFIQLVQTYNQLFEENPINASRVDAKAILSARLSKSRRLENLIAQLPGEKRNGLFGNLIALSLGLTPNFKSNFDLAEDAKLQLSKDTYDDDLDNLLAQIGDQYADLFLAAKNLSDAILLSDILRVNSEITKAPLSASMIKRYDEHHQDLTLLKALVRQQLPEKYKEIFFDQSKNGYAGYIDGGASQEEFYKFIKPILEKMDGTEELLAKLNREDLLRKQRTFDNGSIPHQIHLGELHAILRRQEDFYPFLKDNREKIEKILTFRIPYYVGPLARGNSRFAWMTRKSEETITPWNFEEVVDKGASAQSFIERMTNFDKNLPNEKVLPKHSLLYEYFTVYNELTKVKYVTEGMRKPEFLSGKQKEAIVDLLFKTNRKVTVKQLKEDYFKKIECFDSVEISGVEDRFNASLGTYHDLLKIIKDKDFLDNEENEDILEDIVLTLTLFEDKEMIEERLKTYAHLFDDKVMKQLKRRHYTGWGRLSRKLINGIRDKQSGKTILDFLKSDGFANRNFIQLIHDDSLTFKEAIQKAQVSGQGHSLHEQIANLAGSPAIKKGILQSVKVVDELVKVMGHKPENIVIEMARENQTTQKGQKNSRERMKRIEEGIKELGSQILKEHPVENTQLQNEKLYLYYLQNRRDMYVDQELDINRLSDYDVDHIVPQSFIKDDSIDNKVLTRSDKNRGKSDDVPSEEVVKKMKNYWRQLLNAKLITQRKFDNLTKAERGGLSELDKAGFIKRQLVETRQITKHVAQILDSRMNTKYDENDKLIREVKVITLKSKLVSDFRKDFQFYKVREINNYHHAHDAYLNAVVGTALIKKYPKLESEFVYGDYKVYDVRKMIAKSEQEIGKATAKRFFYSNIMNFFKTEITLANGEIRKRPLIETNEETGEIVWDKGRDFATVRKVLSMPQVNIVKKTEVQTGALTNESIYARGSFDKLISRKHRFESSKYGGFGSPTVTYSVLVVAKYQSYKMEK

SEQ ID NO: 1188 - protein, 1371 aa, Streptococcus dysgalactiae
MDKKYSIGLDIGTNSVGWAVITDDYKVPSKKFKVLGNTDRHSIKKNLIGALLFDSGETAEATRLKRTARRRYTRRKNRIRYLQEIFSSEMSKVDDSFFHRLEESFLVEEDKKHERHPIFGNIVDEVAYHEKYPTIYHLRKKLADSTDKADLRLIYLALAHMIKFRGHFLIEGDLNPDNSDMDKLFIQLVQTYNQLFEENPINASRVDAKAILSARLSKSRRLENLIAQLPGEKRNGLFGNLIALSLGLTPNFKSNFDLAEDAKLQLSKDTYDDDLDNLLAQIGDQYADLFLAAKNLSDAILLSDILRVNSEITKAPLSASMIKRYDEHHQDLTLLKALVRQQLPEKYKEIFFDQSKNGYAGYIDGGASQEEFYKFIKPILEKMDGTEELLAKLNREDLLRKQRTFDNGSIPHQIHLGELHAILRRQEDFYPFLKDNREKIEKILTFRIPYYVGPLARGNSRFAWMTRKSEETITPWNFEEVVDKGASAQSFIERMTNFDKNLPNEKVLPKHSLLYEYFTVYNELTKVKYVTEGMRKPEFLSGKQKEAIVDLLFKTNRKVTVKQLKEDYFKKIECFDSVEISGVEDRFNASLGTYHDLLKIIKDKDFLDNEENEDILEDIVLTLTLFEDKEMIEERLKTYAHLFDDKVMKQLKRRHYTGWGRLSRKLINGIRDKQSGKTILDFLKSDGFANRNFIQLIHDDSLTFKEAIQKAQVSGQGHSLHEQIANLAGSPAIKKGILQSVKVVDELVKVMGHKPENIVIEMARENQTTQKGQKNSRERMKRIEEGIKELGSQILKEHPVENTQLQNEKLYLYYLQNGRDMYVDQELDINRLSDYDVDHIVPQSFIKDDSIDNKVLTRSDKNRGKSDDVPSEEVVKKMKNYWRQLLNAKLITQRKFDNLTKAERGGLSELDKAGFIKRQLVETRQITKHVAQILDSRMNTKYDENDKLIREVKVITLKSKLVSDFRKDFQFYKVREINNYHHAHDAYLNAVVGTALIKKYPKLESEFVYGDYKVYDVRKMIAKSEQEIGKATAKRFFYSNIMNFFKTEITLANGEIRKRPLIETNEETGEIVWNKGRDFATVRKVLSMPQVNIVKKTEVQTGALTNESIYARGSFDKLISRKHRFESSKYGGFGSPTVTYSVLVVAKSKVQDGKVKKIKTGKELIGITLLDKLVFEKNPLKFIEDKGYGNVQIDKCIKLPKYSLFEFENGTRRMLASVMANNNSRGDLQKANEMFLPAKLVTLLYHAHKIESSKELEHEAYILDHYNDLYQLLSYIERFASLYVDVEKNISKVKELFSNIESYSISEICSSVINLLTLTASGAPADFKFLGTTIPRKRYGSPQSILSSTLIHQSITGLYETRIDLSQLGGD

SEQ ID NO: 1189 - protein, 1371 aa, Streptococcus dysgalactiae
MDKKYSIGLDIGTNSVGWAVITDDYKVPSKKFKVLGNTDRHSIKKNLIGALLFDSGETAEATRLKRTARRRYTRRKNRIRYLQEIFSSEMSKVDDSFFHRLEESFLVEEDKKHERHPIFGNIVDEVAYHEKYPTIYHLRKKLADSTDKADLRLIYLALAHMIKFRGHFLIEGDLNPDNSDMDKLFIQLVQTYNQLFEENPINASRVDAKAILSARLSKSRRLENLIAQLPGEKRNGLFGNLIALSLGLTPNFKSNFDLAEDAKLQLSKDTYDDDLDNLLAQIGDQYADLFLAAKNLSDAILLSDILRVNSEITKAPLSASMIKRYDEHHQDLTLLKALVRQQLPEKYKEIFFDQSKNGYAGYIDGGASQEEFYKFIKPILEKMDGTEELLAKLNREDLLRKQRTFDNGSIPHQIHLGELHAILRRQEDFYPFLKDNREKIEKILTFRIPYYVGPLARGNSRFAWMTRKSEETITPWNFEEVVDKGASAQSFIERMTNFDKNLPNEKVLPKHSLLYEYFTVYNELTKVKYVTEGMRKPEFLSGKQKEAIVDLLFKTNRKVTVKQLKEDYFKKIECFDSVEISGVEDRFNASLGTYHDLLKIIKDKDFLDNEENEDILEDIVLTLTLFEDKEMIEERLKKYANLFDDKVMKQLKRRHYTGWGRLSRKLINGIRDKQSGKTILDFLKSDGFANRNFMQLINDDSLTFKEAIQKAQVSGQGHSLHEQIANLAGSPAIKKGILQSVKVVDELVKVMGHKPENIVIEMARENQTTQKGQKNSRERMKRIEEGIKELGSQILKEHPVENTQLQNEKLYLYYLQNGRDMYVDQELDINRLSDYDVDHIVPQSFIKDDSIDNKVLTRSDKNRGKSDNVPSEEVVKKMKNYWRQLLNAKLITQRKFDNLTKAERGGLSELDKAGFIKRQLVETRQITKHVAQILDSRMNTKYDENDKLIREVKVITLKSKLVSDFRKDFQFYKVREINNYHHAHDAYLNAVVGTALIKKYPKLESEFVYGDYKVYDVRKMIAKSEQEIGKATAKRFFYSNIMNFFKTEITLANGEIRKRPLIETNEETGEIVWDKGRDFATVRKVLSMPQVNIVKKTEVQTGALTNESIYARGSFDKLISRKHRFESSKYGGFGSPTVTYSVLVVAKSKVQDGKVKKIKTGKELIGITLLDKLVFEKNPLKFIEDKGYGNVQIDKCIKLPKYSLFEFENGTRRMLASVMANNNSRGDLQKANEMFLPAKLVTLLYHAHKIESSKELEHEAYILDHYNDLYQLLSYIERFASLYVDVEKNISKVKELFSNIESYSISEICSSVINLLTLTASGAPADFKFLGTTIPRKRYGSPQSILSSTLIHQSITGLYETRIDLSQLGGD

SEQ ID NO: 1190 - protein, 1371 aa, Streptococcus dysgalactiae
MDKKYSIGLDIGTNSVGWAVITDDYKVPSKKFKVLGNTDRHSIKKNLIGALLFDSGETAEATRLKRTARRRYTRRKNRIRYLQEIFSSEMSKVDDSFFHRLEESFLVEEDKKHERHPIFGNIVDEVAYHEKYPTIYHLRKKLADSTDKADLRLIYLALAHMIKFRGHFLIEGDLNPDNSDVDKLFIQLVQTYNQLFEEKPINASGVDAKAILSARLSKSKRLENLIAQLPGEKKNGLFGNLIALSLGLTPNFKSNFDLAEDAKLQLSKDTYDDDLDNLLAQIGNQYADLFLAAKNLSDAILLSDILRVNSEITKAPLSASMIKRYDEHHQDLTLLKALVRQQLPEKYKEIFFDQSKNGYAGYIDGGASQEEFYKFIKPILEKMDGTEELLAKLNREDLLRKQRTFDNGSIPHQIHLGELHAILRRQEDFYPFLKDNREKIEKILTFRIPYYVGPLARGNSRFAWMTRKSEETITPWNFEEVVDKGASAQSFIERMTNFDKNLPNEKVLPKHSLLYEYFTVYNELTKVKYVTEGMRKPEFLSGKQKEAIVDLLFKTNRKVTVKQLKEDYFKKIECFDSVEISGVEDRFNASLGTYHDLLKIIKDKDFLDNEENEDILEDIVLTLTLFEDKEMIEERLKKYANLFDDKVMKQLKRRHYTGWGRLSRKLINGIRDKQSGKTILDFLKSDGFANRNFMQLINDDSLTFKEAIQKAQVSGQGHSLHEQIANLAGSPAIKKGILQSVKVVDELVKVMGHKPENIVIEMARENQTTQKGQKNSRERMKRIEEGIKELGSQILKEHPVENTQLQNEKLYLYYLQNGRDMYVDQELDINRLSDYDVDHIVPQSFIKDDSIDNKVLTRSDKNRGKSDNVPSEEVVKKMKNYWRQLLNAKLITQRKFDNLTKAERGGLSELDKAGFIKRQLVETRQITKHVAQILDSRMNTKYDENDKLIREVKVITLKSKLVSDFRKDFQFYKVREINNYHHAHDAYLNAVVGTALIKKYPKLESEFVYGDYKVYDVRKMIAKSEQEIGKATAKRFFYSNIMNFFKTEITLANGEIRKRPLIETNEETGEIVWDKGRDFATVRKVLSMPQVNIVKKTEVQTGALTNESIYARGSFDKLISRKHRFESSKYGGFGSPTVTYSVLVVAKSKVQDGKVKKIKTGKELIGITLLDKLVFEKNPLKFIEDKGYGNVQIDKCIKLPKYSLFEFENGTRRMLASVMANNNSRGDLQKANEMFLPAKLVTLLYHAHKIESSKELEHEAYILDHYNDLYQLLSYIERFASLYVDVEKNISKVKELFSNIESYSISEICSSVINLLTLTASGAPADFKFLGTTIPRKRYGSPQSILSSTLIHQSITGLYETRIDLSQLGGD

SEQ ID NO: 1191 - protein, 1370 aa, Streptococcus gallolyticus; identical to SEQ ID NO: 204

SEQ ID NO: 1192 - protein, 1375 aa, Streptococcus infantarius
MEKSYSIGLDIGTNSVGWAVITDDYKVPAKKMKVLGNTDKKYIKKNLLGALLFDSGETAEVTRLKRTARRRYTRRKNRLRYLQEIFAKEMTKVDESFFQRLEESFLTDDDKTFDSHPIFGNKAEEDAYHQKFPTIYHLRKYLADSQEKADLRLVYLALAHMIKYRGHFLIEGELNAENTDVQKLFNVFVETYDKIVDESHLSEIEVDASSILTEKVSKSRRLENLIKQYPTEKKNTLFGNLIALALGLQPNFKTNFKLSEDAKLQFSKDTYEEDLEELLGKVGDDYADLFISAKNLYDAILLSGILTVDDNSTKAPLSASMIKRYVEHHEDLEKLKEFIKINKLKLYHDIFKDKTKNGYAGYIDNGVKQDEFYKYLKTILTKIDDSDYFLDKIERDDFLRKQRTFDNGSIPHQIHLQEMHSILRRQGDYYPFLKENQAKIEKILTFRIPYYVGPLARKDSRFAWANYHSDEPITPWNFDEVVDKEKSAEKFITRMTLNDLYLPEEKVLPKHSHVYETFTVYNELTKIKYVNEQGESFFFDANMKQEIFDHVFKENRKVTKAKLLSYLNNEFEEFRINDLIGLDKDSKSFNASLGTYHDLKKILDKSFLDDKTNGQIIEDIVLTLTLFEDRDMIHERLQKYSDFFTSQQLKKLERRHYTGWGRLSYKLINGIRNKENNKTILDFLIDDGHANRNFMQLINDESLSFKTIIQEAQVVGDVDDIEAVVHDLPGSPAIKKGILQSVKIVDELVKVMGDNPDNIVIEMARENQTTGYGRNKSNQRLKRLQDSLKEFGSDILSKKKPSYVDSKVENSHLQNDRLFLYYIQNGKDMYTGEELDIDRLSDYDIDHIIPQAFIKDNSIDNKVLTSSAKNRGKSDDVPSIEIVRNRRSYWYKLYKSGLISKRKFDNLTKAERGGLTEADKAGFIKRQLVETRQITKHVAQILDARFNTKRDENDKVIRDVKVITLKSNLVSQFRKEFKFYKVREINDYHHAHDAYLNAVVGTALLKKYPKLTPEFVYGEYKKYDVRKLIAKSSDDYSEMGKATAKYFFYSNLMNFFKTEVKYADGRVFERPDIETNADGEVVWNKQKDFDIVRKVLSYPQVNIVKKVEAQTGGFSKESILSKGDSDKLIPRKTKKVYWNTKKYGGFDSPTVAYSVLVVADIEKGKAKKLKTVKELVGISIMERSFFEENPVSFLEKKGYHNVQEDKLIKLPKYSLFEFEGGRRRLLASATELQKGNEVMLPAHLVELLYHAHRIDSFNSTEHLKYVSEHKKEFEKVLSCVENFSNLYVDVEKNLSKVRAAAESMTNFSLEEISASFINLLTLTALGAPADFNFLGEKIPRKRYTSTKECLSATLIHQSVTGLYETRIDLSKLGEE

SEQ ID NO: 1193 - protein, 1368 aa, Streptococcus iniae
MRKPYSIGLDIGTNSVGWAVITDDYKVPSKKMRIQGTTDRTSIKKNLIGALLFDNGETAEATRLKRTTRRRYTRRKYRIKELQKIFSSEMNELDIAFFPRLSESFLVSDDKEFENHPIFGNLKDEITYHNDYPTIYHLRQTLADSDQKADLRLIYLALAHIIKFRGHFLIEGNLDSENTDVHVLFLNLVNIYNNLFEEDIVETASIDAEKILTSKTSKSRRLENLIAEIPNQKRNMLFGNLVSLALGLTPNFKTNFELLEDAKLQISKDSYEEDLDNLLAQIGDQYADLFIAAKKLSDAILLSDIITVKGASTKAPLSASMVQRYEEHQQDLALLKNLVKKQIPEKYKEIFDNKEKNGYAGYIDGKTSQEEFYKYIKPILLKLDGTEKLISKLEREDFLRKQRTFDNGSIPHQIHLNELKAIIRRQEKFYPFLKENQKKIEKLFTFKIPYYVGPLANGQSSFAWLKRQSNESITPWNFEEVVDQEASARAFIERMTNFDTYLPEEKVLPKHSPLYEMFMVYNELTKVKYQTEGMKRPVFLSSEDKEEIVNLLFKKERKVTVKQLKEEYFSKMKCFHTVTILGVEDRFNASLGTYHDLLKIFKDKAFLDDEANQDILEEIVWTLTLFEDQAMIERRLVKYADVFEKSVLKKLKKRHYTGWGRLSQKLINGIKDKQTGKTILGFLKDDGVANRNFMQLINDSSLDFAKIIKNEQEKTIKNESLEETIANLAGSPAIKKGILQSIKIVDEIVKIMGQNPDNIVIEMARENQSTMQGIKNSRQRLRKLEEVHKNTGSKILKEYNVSNTQLQSDRLYLYLLQDGKDMYTGKELDYDNLSQYDIDHIIPQSFIKDNSIDNTVLTTQASNRGKSDNVPNIETVNKMKSFWYKQLKSGAISQRKFDHLTKAERGALSDFDKAGFIKRQLVETRQITKHVAQILDSRFNSNLTEDSKSNRNVKIITLKSKMVSDFRKDFGFYKLREVNDYHHAQDAYLNAVVGTALLKKYPKLEAEFVYGDYKHYDLAKLMIQPDSSLGKATTRMFFYSNLMNFFKKEIKLADDTIFTRPQIEVNTETGEIVWDKVKDMQTIRKVMSYPQVNIVMKTEVQTGGFSKESIWPKGDSDKLIARKKSWDPKKYGGFDSPIIAYSVLVVAKIAKGKTQKLKTIKELVGIKIMEQDEFEKDPIAFLEKKGYQDIQTSSIIKLPKYSLFELENGRKRLLASAKELQKGNELALPNKYVKFLYLASHYTKFTGKEEDREKKRSYVESHLYYFDEIMQIIVEYSNRYILADSNLIKIQNLYKEKDNFSIEEQAINMLNLFTFTDLGAPSAFKFFNGDIDRKRYSSTNEIINSTLIYQSPTGLYETRIDLSKLGGK

SEQ ID NO: 1194 - protein, 1392 aa, Streptococcus mitis
MNNNNYSIGLDIGTNSVGWAVITDDYKVPSKKMKVLGNTDKHFIKKNLIGALLFDEGATAEDRRFKRTARRRYTRRKNRLRYLQEIFSEEMSKVDSSFFHRLDDSFLVPEDKRGSKYPIFATLAEEKEYHKKFPTIYHLRKHLADSKEKTDLRLIYLALAHMIKYRGHFLYEESFDIKNNDIQKIFSEFISIYDNTFEGSSLSGQNAQVEAIFTDKISKSAKRERILKLFAYEKSTDLFSEFLKLIVGNQADFKKHFDLEEKAPLQFSKDTYDEDLENLLGQIGDDFADLFLVAKKLYDAILLSGILTVTDSSTKAPLSASMIERYENHQKDLAALKQFIQNNLQEKYDEVFSDQSKDGYARYINGKTTQEAFYKYIKNLLSKFEGSDYFLDKIEREDFLRKQRTFDNGSIPHQIHLQEMNAIIRRQGEHYPFLKEYKEKIETILTFRIPYYVGPLARGNRNFAWLTRNSDQAIRPWNFEEIVDQASSAEEFINKMTNYDLYLPEEKVLPKHSLLYETFAVYNELTKVKFISEGLRDYQFLDSGQKKQIVNQLFKEKRKVTEKDIIQYLHNVDGYDGIELKGIEKQFNASLSTYHDLLKIIKDKEFMDDPKNEEILENIVHTLTIFEDREMIKQRLAQYASIFDKKVIKALTRRHYTGWGKLSAKLINGICDKKTGKTILDYLIDDGYSNRNFMQLINDDGLSFKDIIQKAQVVGKTNDVKQVVQELPGSPAIKKGILQSIKLVDELVKVMGHAPESIVIEIARENQTTARGKKNSQQRYKRIEDALKNLAPGLDSNILKEHPTDNIQLQNDRLFLYYLQNGKDMYTGEALDINQLSSYDIDHIVPQAFIKDDSLDNRVLTSSKDNRGKSDNVPSLEVVQKRKAFWQQLLDSKLISEHKFNNLTKAERGGLDERDKVGFIRRQLVETRQITKHVAQILDARFNTEVNEKDKKNRTVKIITLKSNLVSNFRKEFKLYKVREINDYHHAHDAYLNAVVAKAILKKYPKLEPGFVYGDYQKYDIKRYISRSKDPKEVEKATEKYFFYSNLLNFFKEEVHYADGTIVKRENIEYSKDTGEIAWNKEKDFATIKKVLSLPQVNIVKKTEIQTHGLDRGKPRGLFNSNPSPKPSEDRKENLVPIKQGLDPRKYGGYAGISNSYAVLVKAIIEKGAKKQQKTVLEFQGISILDKINFEKNKENYLLEKGYIKILSTITLPKYSLFEFPDGTRRRLASILSTNNKRGEIHKGNELVIPEKYTTLLYHAKNINKTLEPEHLEYVEKHRNDFAKLLEYVLNFNDKYVGALKNGERIRQAFIDWETVDIEKLCFSFIGPRNSKNAGLFELTSQGSASDFEFLGVKIPRYRDYTPSSLLNATLIHQSITGLYETRIDLSKLGED

SEQ ID NO: 1195 - protein, 1134 aa, Streptococcus mutans
MANGKILGLDIGIASVGVGIIDKETGKIIHVNSRIFPAATADSNVERRGFRQGRRLVRRKKHRKVRLADLFLDSNLLTDFSKVSLNLNPYQLRVKGLNEELSNEELFIALKSIVSRRGISYLDDASEDSGANSSEYGKAVEENRKLLEDRTPGQIQLERFEKYGKVRGDFTVVENGENHRLINVFSTSAYKKEAERILRRQQEFNMRIADEFIEAYLTILTGKRKYYHGPGNEKSRTDYGRFRTDGTTLDNIFGILIGKCTFYPDEYRAAKASYTAQEFNLLNDLNNLTVPTETKKLSEEQKRQIIEHAKTVKTLGAPTLLKYIVKLVGCSADDIKGYRIDKSDKPEIHTFEAYRKMRTMELIKVDDLSRESLDALAHILTLNTEREGIEEAIRDRFTNKEFNQEQINELVLFRKNNSSLFGKGWHNFSLKLMKELIPELYETSEEQMTILTRLGKQRVKKSSNRTNYIDEKELTEEIYNPVVAKSVRQAIKIINLATKKYGVFDNIVIEMARESNEDDEKKAIQNAQKANEDEKKAALLKAAHQFNGKEELPDSIFHGHKELLTKIRLWHQQGEKCLYTGKTIFINDLIHNPYKYEIDHILPLSLSFDDSLANKVLVLSTANQEKGQRTPFQSLDSMDGAWTYREFKSYVKGLKTLSNKKKDYLLTEENIDKIEVKQKFIERNLVDTRYSSRVVLNALQDFYKERKFDTKISVVRGQFTSQLRRKWRIEKTRETYHHHAVDALIIAASSQLNLWKKQNNPLISYKEDQFVDPETGEILSLSDDEYKKLVFKAPYEHFVDTLKSKKFEDSILFSYQVDSKYNRKISGATICGTRKAQLGKDTQEETYVLGKIKDIYSQKGYEDFIKKYKKDKTQFLMYHKDPQTFEKVIEEILKTYPDKELNEKGKEVSCNPFEKYRQENGPVRKYSKKGNGPEIKSLKYYDEVLGKNIDITPKNSLNKVVLRSLNPWRTDVYFNHETRKYEFLGLKYSDLRYLKGEHRYGILIGDYKKIKDKEGIEKESEFKFTLYKNDLILIKDTAKGKEELFRFWSRTGKDNAKTFEKNKIELKPYSKSQFEKGEDTNVLGKLYASSNQLQKSFGTLENLSIYKVRTDVLGNKYFIKKEGDKPQLNFKKKL

SEQ ID NO: 1196 - protein, 1134 aa, Streptococcus mutans; identical to SEQ ID NO: 1195

SEQ ID NO: 1197 - protein, 1128 aa, Streptococcus mutans
MANSKILGLDIGIASVGVGIIDKETGKIIHVNSRIFPAATADSNVERRGFRQGRRLVRRKKHRKVRLADLFLDSNLLTDFSKVSLNLNPYQLRVKGLNEELSNEELFIALKSIVSRRGISYLDDASEDSGANSSEYGKAVEENRKLLEDRTPGQIQLERFEKYGKVRGDFTVVENGENHRLINVFSTSAYKKEAERILRRQQEFNIRIADEFIEAYLTILTGKRKYYHGPGNEKSRTDYGRFRTDGTTLDNIFGILIGKCTFYPDEYRAAKASYTAQEFNLLNDLNNLTVPTETKKLSEEQKRQIIEHAKTVKTLGAPTLLKYIAKLVGCSADDIKGYRIDKSDKPEIHTFEAYRKMRTMELIKVADLSRESLDALAHILTLNTEREGIEEAIRDRFTNKEFNQEQINELVLFRKNNSSLFGKGWHNFSLKLMKELIPELYETSEEQMTILTRLGKQRVKKSSNRTNYIDEKELTEEIYNPVVAKSVRQAIKIINLATKKYGVFDNIVIEMARESNEDDEKKAIQNAQKANEDEKEAALLKAAHQFNGKEELPDSIFHGHKELLTKIRLWHQQGEKCLYTGKTIFINDLIHNPYKYEIDHILPLSLSFDDSLANKVLVLSTANQEKGQRTPFQSLDSMDGAWTYREFKAYVKGLKTLSNKKKDYLLNEEDINKNEVKQKFIERNLVDTRYSSRVVLNTLQDFYKKREFDTKISVVRGQFTSQIRRKWRIEKTRETYHHHAVDALIIAASSQLNLWKKQNNPLISYKEDQFVDPETGEILSLSDDEYKELVFKAPYDHFVDTLKSKKFEDSILFSYQVDSKYNRKISDATIYGTRKARLGKDSQEETYVLGKIKDIYSQKGYEDFIKKYKKDKTQFLMYHKDPQTFEKVIEEILKTYSDKELNEKGKEVPCNPFEKYRQENGPVRKYSKKGNGPEIKSIKYYDNKLGNHIDITPNNSHHQVVLQSLKPWRTDVYFNPKSGKYELMGLKYSDLRFEKVSGDYGISVKKYNEIKSKEGVDENSEFKFTLYKNDLILIKDTESGEQELFRFLSRTMPNQKHYVELKPYDKSKFEGHQKLMDIFGEVAKGGQCLKGLNKSNISIYKVKTDVLGNKYFIKKEGDQPQLNFKKKI

SEQ ID NO: 1198 - protein, 1128 aa, Streptococcus mutans; identical to SEQ ID NO: 1197

SEQ ID NO: 1199 - protein, 1338 aa, Streptococcus mutans
MDLIGTNSVGWAVVTDDYKVPAKKMKVLGNTDKSHIKKNLLGALLFDSGNTAADRRLKRTARRRYTRRRNRILYLQEIFAEEMSKVDDSFFHRLEDSFLVTEDKRGERHPIFGNLEEEVKYHENFPTIYHLRQYLADNPEKVDLRLVYLALAHIIKFRGHFLIEGKFDTRNNDVQRLFQEFLAVYDNTFENSSLQEQNVQVEEILTDKISKSAKKDRVLKLFPNEKSNGRFAEFLKLIVGNQADFKKHFELEEKAPLQFSKDTYEEELEVLLAQIGDNYAELFLSAKKLYDSILLSGILTVTDVSTKAPLSASMIQRYNEHQMDLAQLKQFIRQKLSDKYNEVFSDVSKDGYAGYIDGKTNQEAFYKYLKGLLNKIEGSGYFLDKIEREDFLRKQRTFDNGSIPHQIHLQEMRAIIRRQAEFYPFLADNQDRIEKILTFRIPYYVGPLARGKSDFAWLSRKSADKITPWNFDEIVDKESSAEAFINRMTNYDLYLPNQKVLPKHSLLYEKFTVYNELTKVKYKTEQGKTAFFDANMKQEIFDGVFKVYRKVTKDKLMDFLEKEFDEFRIVDLTGLDKENKAFNASYGTYHDLRKILDKDFLDNSKNEKILEDIVLTLTLFEDREMIRKRLENYSDLLTKEQVKKLERRHYTGWGRLSAELIHGIRNKESRKTILDYLIDDGNSNRNFMQLINDDALSFKEEIAKAQVIGETDNLNQVVSDIAGSPAIKKGILQSLKIVDELVKIMGHQPENIVVEMARENQFTNQGRRNSQQRLKGLTDSIKEFGSQILKEHPVEHSQLQNDRLFLYYLQNGRDMYTGEELDIDYLSQYDIDHIIPQAFIKDNSIDNRVLTSSKENRGKSDDVPSKNVVRKMKSYWSKLLSAKLITQRKFDNLTKAERGGLTDDDKAGFIKRQLVETRQITKHVARILDERFHTETDENNKKIRQVKIVTLKSNLVSNFRKEFELYKVREINDYHHAHDAYLNAVIGKALLGVYPQLEPEFVYGDYPHFHGHKENKATAKKFFYSNIMNFFKKDDVRTDKNGEIIWKKDEHISNIKKVLSYPQVNIVKKVEEQTGGFSKESILPKGNSDKLIPRKTKKFYWDTKKYGGFDSPIVAYSILVIADIEKGKSKKLKTVKALVGVTIMEKMTFERDPVAFLERKGYRNVQEENIIKLPKYSLFKLENGRKRLLASARELQKGNEIVLPNHLGTLLYHAKNIHKVDEPKHLDYVDKHKDEFKELLDVVSNFSKKYTLAEGNLEKIKELYAQNNGEDLKELASSFINLLTFTAIGAPATFKFFDKNIDRKRYTSTTEILNATLIHQSITGLYETRIDLSKLGGD

SEQ ID NO: 1200 - protein, 1338 aa, Streptococcus mutans; identical to SEQ ID NO: 1199

SEQ ID NO: 1201 - protein, 1345 aa, Streptococcus mutans
MKKPYSIGLDIGTNSVGWAVVTDDYKVPAKKMKVLGNTDKSHIEKNLLGALLFDSGNTAEDRRLKRTARRRYTRRRNRILYLQEIFSEEMGKVDDSFFHRLEDFFLVTEDKRGERHPIFGNLEEEVKYHENFPTIYHLRQYLADNPEKVDLRLVYLALAHIIKFRGHFLIEGKFDTRNNDVQRLFQEFLAVYDNTFENSSLQEQNVQVEEILTDKISKSAKKDRVLKLFPNEKSNGRFAEFLKLIVGNQADFKKHFELEEKAPLQFSKDTYEEELEVLLAQIGDNYAELFLSAKKLYDSILLSGILTADDSSTKAPLSASMIQRYNEHQMDLAQLKQFIRQKLSDKYNEVFSDVSKDGYAGYIDGKTNQEAFYKYLKGLLNKIEGSGYFLDKIEREDFLRKQRTFDNGSIPHQIHLQEMRAIIRRQSEFYPFLADNQDRIEKILTFRIPYYVGPLARGKSDFAWLSRKSADKITPWNFDEIVDKESSAEAFINRMTNYDLYLPNQKVLPKHSLLYEKFTVYNELTKVKYKTEQGETAFFDANMKQEIFDGVFKVYRKVTKDKLMDFLEKEFDEFRIVDLTGLDKENKAFNASYGTYHDLRKILDKDFLDNSKNEKILEDIVLTLTLFEDREMIRKRLKNYSDLLTKEQLKKLERRHYTGWGRLSAELIHGIRNKESRKTILDYLIDDGNSNRNFMQLINDDALSFKEEIAKAQVIGETDNLNQVVSDIAGSPAIKKGILQSLKIVDELVKIMGHQPENIVVEMARENQFTNQGRRNSQQRLKGLTDSIKEFGSQILKEHPVENSQLQNDRLFLYYLQNGRDMYTGEELDIDYLSQYDIDHIIPQAFIKDNSIDNRVLTSSKENRGKSDDVPSKDVVRKMKPYWSKLLSAKLITQRKFDNLTKAERGGLTDDDKAGFIKRQLVETRQITKHVARILDERFNTETDENNKKIRQVKIVTLKSNLVSNFRKEFELYKVREINDYHHAHDAYLNAVIGKALLGVYPQLEPEFVYGDYPHFHGHEENKATAKKFFYSNIMNFFKKDDVRTDKNGEIIWKKDEHISNIKKVLSYPQVNIVKKVEEQTGGFSKESILPKGNSDKLIPRKTKKFYWDTKKYGGFDSPIVAYSILVIADIEKGKSKKLKTVKALVGVTIMEKMTFERDPVAFLERKGYRNVQEENIIKLPKYSLFKLENGRKRLLASARELQKGNEIVLPNHLGTLLYHAKNIHKVDEPKHLDYVDKHKDEFKELLDVVSNFSKKYTLAEGNLEKIKELYAQNNGEDLKELASSFINLLTFTAIGAPATFKFFDKNIDRKRYTSTTEILNATLIHQSITGLYETRIDLSKLGGD

SEQ ID NO: 1202 - protein, 1345 aa, Streptococcus mutans; identical to SEQ ID NO: 1201

SEQ ID NO: 1203 - protein, 1229 aa, Streptococcus mutans
MKKPYSIGLDIGTNSVGWAVVTDDYKVPAKKMKVLGNTDKSHIEKNLLGALLFDSGNTAEDRRLKRTARRRYTRRRNRILYLQEIFSEEMGKVDDSFFHRLEDSFLVTEDKRGERHPIFGNLEEEVKYHENFPTIYHLRQYLADNPEKVDLRLVYLALAHIIKFRGHFLIEGKFDTRNNDVQRLFQEFLAVYDNTFENSSLQEQNIQVEEILTDKISKSAKKDRVLKLFPNEKSNGRFAEFLKLIVGNQADFKKHFELEEKAPLQFSKDTYEEELEVLLAQIGDNYAELFLSAKKLYDSILLSGILTVTDVGTKAPLSASMIQRYNEHQMDLTQLKQFIRQKLSDKYNEVFSDVSKDGYAGYIDGKTNQEAFYKYLKGLLNKIEGSGYFLDKIEREDFLRKQRTFDNGSIPHQIHLQEMRAIIRRQAEFYPFLADNQDRIEKILTFRIPYYVGPLARGKSDFAWLSRKSADKITPWNFDEIVDKESSAEAFINRMTNYDLYLPNQKVLPKHSLLYEKFTVYNELTKVKYKTEQGKTAFFDANMKQEIFDGVFKVYRKVTKDKLMDFLEKEFDEFRIVDLTGLDKENKVFNASYGTYHDLCKILDKDFLDNSKNEKILEDIVLTLTLFEDREMIRKRLENYSDLLTKEQVKKLERRHYTGWGRLSAELIHGIRNKESRKTILDYLIDDGNSNRNFMQLINDDALSFKEEIAKAQVIGETDNLNQVVSDIAGSPAIKKGILQSLKIVDELVKIMGHQPENIVVEMARENQFTNQGRRNSQQRLKGLTDSIKEFGSQILKEHPVENSQLQNDRLFLYYLQNGRDMYTGEELDIDYLSQYDIDHIIPQAFIKDNSIDNRVLTSSKENRGKSDDVPSKDVVRKMKPYWSKLLSAKLITQRKFDNLTKAERGGLTDDDKAGFIKRQLVETRQITKHVARILDERFNTETDENNKKIRQVKIVTLKSNLVSNFRKEFELYKVREINDYHHAHDAYLNAVIGKALLGVYPQLEPEFVYGDYPHFHGHEENKATAKKFFYSNIMNFFKKDDVRTDKNGEIIWKKDEHISNIKKVLSYPQVNIVKKVEEQTIGQNGGLFDDNPKSPLEVIPSKLVPLKKALNPEKYGGYQKPTTAYPILLIVDTKQLIPISVMDKKRFEQNPVKFLKDKGYQQIEKNNFVKLPKYTLVDIGNGIKRLWASSKEVHKGNQLVVSKKSQDLLYHAHHLDNDYSNEYVKNHY

SEQ ID NO: 1204 - protein, 1229 aa, Streptococcus mutans; identical to SEQ ID NO: 1203

SEQ ID NO: 1205 - protein, 1345 aa, Streptococcus mutans
MKKPYSIGLDIGTNSVGWAVVTDDYKVPAKKMKVLGNTDKSHIEKNLLGALLFDSGNTAEDRRLKRTARRRYTRRRNRILYLQEIFSEEMGKVDDSFFHRLEDSFLVTEDKRGERHPIFGNLEEEVKYHENFPTIYHLRQYLADNPEKVDLRLVYLALAHIIKFRGHFLIEGKFDTRNNDVQRLFQEFLAVYDNTFENSSLQEQNVQVEEILTDKISKSAKKDRVLKLFPNEKSNGRFAEFLKLIVGNQADFKKHFELEEKAPLQFSKDTYEEELEVLLAQIGDNYAELFLSAKKLYDSILLSGILTVTDVGTKAPLSASMIQRYNEHQMDLAQLKQFIRQKLSDKYNEVFSDVSKDGYAGYIDGKTNQEAFYKYLKGLLNKIEGSGYFLDKIEREDFLRKQRTFDNGSIPHQIHLQEMRAIIRRQAEFYPFLADNQDRIEKLLTFRIPYYVGPLARGKSDFAWLSRKSADKITPWNFDEIVDKESSAEAFINRMTNYDLYLPNQKVLPKHSLLYEKFTVYNELIKVKYKTEQGKTAFFDANMKQEIFDGVFKVYRKVTKDKLMDFLEKEFDEFRIVDLTGLDKENKVFNASYGTYHDLCKILDKDFLDNSKNEKILEDIVLTLTLFEDREMIRKRLENYSDLLTKEQVKKLERRHYTGWGRLSAELIHGIRNKESRKTILDYLIDDGNSNRNFMQLINDDALSFKEEIAKAQVIGETDNLNQVVSDIAGSPAIKKGILQSLKIVDELVKIMGHQPENIVVEMARENQFTNQGRRNSQQRLKGLTDSIKEFGSQILKEHPVENSQLQNDRLFLYYLQNGRDMYTGEELDIDYLSQYDIDHIIPQAFIKDNSIDNRVLTSSKENRGKSDDVPSKDVVRKMKSYWSKLLSAKLITQRKFDNLTKAERGGLTDDDKAGFIKRQLVETRQITKHVARILDERFNTETDENNKKIRQVKIVTLKSNLVSNFRKEFELYKVREINDYHHAHDAYLNAVIGKALLGVYPQLEPEFVYGDYPHFHGHKENKATAKKFFYSNIMNFFKKDDVRTDKNGEIIWKKDEHISNIKKVLSYPQVNIVKKVEEQTGGFSKESILPKGNSDKLIPRKTKKFYWDTKKYGGFDSPIVAYSILVIADIEKGKSKKLKTVKALVGVTIMEKMTFERDPVAFLERKGYRNVQEENIIKLPKYSLFKLENGRKRLLASARELQKGNEIVLPNHLGTLLYHAKNIHKVDEPKHLDYVDKHKDEFKELLDVVSNFSKKYTLAEGNLEKIKELYAQNNGEDLKELASSFINLLTFTAIGAPATFKFFDKNIDRKRYTSTTEILNATLIHQSITGLYETRIDLNKLGGD

SEQ ID NO: 1206 - protein, 1350 aa, Streptococcus mutans
MKKPYSIGLDIGTNSVGWAVVTDDYKVPAKKMKVLGNTDKSHIEKNLLGALLFDSGNTAEDRRLKRTARRRYTRRRNRILYLQEIFSEEMGKVDDSFFHRLEDSFLVTEDKRGERHPIFGNLEEEVKYHENFPTIYHLRQYLADNPEKVDLRLVYLALAHIIKFRGHFLIEGKFDTRNNDVQRLFQEFLAVYDNTFENSSLQEQNVQVEEILTDKISKSAKKDRVLKLFPNEKSNGRFAEFLKLIVGNQADFKKHFELEEKAPLQFSKDTYEEELEVLLAQIGDNYAELFLSAKKLYDSILLSGILTVTDVSTKAPLSASMIQRYNEHQMDLTQLKQFIRQKLSDKYNEVFSDVSKDGYAGYIDGKTNQEAFYKYLKGLLNKIEGSGYFLDKIEREDFLRKQRTFDNGSIPHQIHLQEMRAIIRRQAEFYSFLADNQDRIEKILTFRIPYYVGPLARGKSDFAWLSRKSADKITPWNFDEIVDKESSAEAFINRMTNYDLYLPNQKVLPKHSLLYEKFTVYNELTKVKYKTEQGKTAFFDANMKQEIFDGVFKVYRKVTKDKLMDFLEKEFDEFRIVDLTGLDKENKAFNASYGTYHDLRKILDKDFLDNSKNEKILEDIVLTLTLFEDREMIRKRLENYSDLLTKEQVKKLERRHYTGWGRLSAELIHGIRNKESRKTILDYLIDDGNSNRNFMQLINDDALSFKEEIAKAQVIGETDNLNQVVSDIAGSPAIKKGILQSLKIVDELVKIMGHQPENIVVEMARENQFTNQGRRNSQQRLKGLTDSIKEFGSQILKEHPVENSQLQNDRLFLYYLQNGRDMYTGEELDIDYLSQYDIDHIIPQAFIKDNSIDNRVLTSSKENRGKSDDVPSEDVVNRMRPFWNKLLSSGLISQRKYNNLTKKELTLDDKAGFIKRQLVETRQITKHVARMLDERFNKEFDDNNKRIRKVKIVTLKSNLVSSFRKEFELYKVREINDYHHAHDAYLNAVVVKALLVKYSKLEPEFVYGEYPKYNSYRERKTATQKMFFYSNIMNMFKSKVKLADDQIVERPMIEVNDETGEIAWDKTKHITTVKKVLSYPQVNIVKKVEEQTIGQNGGLFDDNPKSPLEVIPSKLVPLKKALNPEKYGGYQKPTTAYPILLIVDTKQLIPISVMDKKRFEQNPVKFLKDKGYQQIEKNNFVKLPKYTLVDIGNGIKRLWASSKEVHKGNQLVVSKKSQDLLYHAHHLDNDYSNEYVKNHYQQFDILFNEITSFSKKCKLGKEHIQKIEEAYSKERDSASIEELADGFIKLLGFTQLGATSPFSFLGIKLNQKQYTGKKDYLLPCMEATLIHQSITGLYETRIDLSKLGGD

SEQ ID NO: 1207 - protein, 1350 aa, Streptococcus mutans
MKKPYSIGLDIGTNSVGWAVVTDDYKVPAKKMKVLGNTDKSHIEKNLLGALLFDSGNTAEDRRLKRTARRRYTRRRNRILYLQEIFSEEMGKVDDSFFHRLEDSFLVTEDKRGERHPIFGNLEEEVKYHENFPTIYHLRQYLADNPEKVDLRLVYLALAHIIKFRGHFLIEGKFDTRNNDVQRLFQEFLAVYDNTFENSSLQEQNVQVEEILTDKISKSAKKDRVLKLFPNEKSNGRFAEFLKLIVGNQADFKKHFELEEKAPLQFSKDTYEEELEVLLAQIGDNYAELFLSAKKLYDSILLSGILTVTDVSTKAPLSASMIQRYNEHQMDLTQLKQFIRQKLSDKYNEVFSDVSKDGYAGYIDGKTNQEAFYKYLKGLLNKIEGSGYFLDKIEREDFLRKQRTFDNGSIPHQIHLQEMRAIIRRQAEFYPFLADNQDRIEKILTFRIPYYVGPLARGKSDFAWLSRKSADKITPWNFDEIVDKESSAEAFINRMTNYDLYLPNQKVLPKHSLLYEKFTVYNELTKVKYKTEQGKTAFFDANMKQEIFDGVFKVYRKVTKDKLMDFLEKEFDEFRIVDLTGLDKENKAFNASYGTYHDLRKILDKDFLDNSKNEKILEDIVLTLTLFEDREMIRKRLKNYSDLLTKEQLKKLERRHYTGWGRLSAELIHGIRNKESRKTILDYLIDDGNSNRNFMQLINDDALSFKEEIAKAQVIGETDNLNQVVSDIAGSPAIKKGILQSLKIVDELVKIMGHQPENIVVEMARENQFTNQGRQNSQQRLKGLTDSIKEFGSQILKEHPVENSQLQNDRLFLYYLQNGRDMYTGEELDIDYLSQYDIDHIIPQAFIKDNSIDNRVLTSSKENRGKSDDVPSEDVVNRMRPFWNKLLSSGLISQRKYNNLTKKELTLDDKAGFIKRQLVETRQITKHVARMLDERFNKEFDDNNKRICKVKIVTLKSNLVSSFRKEFELYKVREINDYHHAHDAYLNAVVVKALLVKYSKLEPEFVYGEYPKYNSYRERKTATQKMFFYSNIMNMFKSKVKLADDQIVERPMIEVNDETGEIAWDKTKHITTVKKVLSYPQVNIVKKVEEQTIGQNGGLFDDNPKSPLEVIPSKLVPLKKALNPEKYGGYQKPTTAYPILLIVDTKQLIPISVMDKKRFEQNPVKFLKDKGYQQIEKNNFVKLPKYTLVDIGNGIKRLWASSKEVHKGNQLVVSKKSQDLLYHAHHLDNDYSNEYVKNHYQQFDILFNEITSFSKKCKLGKEHIQKIEEAYSKERDSASIEELADGFIKLLGFTQLGATSPFSFLGIKLNQKQYTGKKDYLLPCMEATLIHQSITGLYETRIDLSKLGGD

SEQ ID NO: 1208 - protein, 1345 aa, Streptococcus mutans; identical to SEQ ID NO: 1205

SEQ ID NO: 1209 - protein, 1350 aa, Streptococcus mutans; identical to SEQ ID NO: 1206

SEQ ID NO: 1210 - protein, 1350 aa, Streptococcus mutans; identical to SEQ ID NO: 1207

SEQ ID NO: 1211 - protein, 1345 aa, Streptococcus mutans
MKKPYSIGLDIGTNSVGWAVVTDDYKVPAKKMKVLGNTDKSHIKKNLLGALLFDSGNTAADRRLKRTARRRYTRRRNRILYLQEIFAEEMSKVDDSFFHRLEDSFLVTEDKRGERHPIFGNLEEEVKYHENFPTIYHLRQYLADNPEKVDLRLVYLALAHIIKFRGHFLIEGKFDTRNNDVQRLFQEFLAVYDNTFENSSLQEQNVQVEEILTDKISKSAKKDRVLKLFPNEKSNGRFAEFLKLIVGNQADFKKHFELEEKAPLQFSKDTYEEELEVLLTQIGDNYAELFLSAKKLYDSILLSGILTVTDVSTKAPLSASMIQRYNEHQMDLAQLKQFIRQKLSDKYNEVFSDVSKDGYAGYIDGKTNQEAFYKYLKGLLNKIEGSGYFLDKIEREDFLRKQRTFDNGSIPHQIHLQEMRAIIRRQAEFYPFLADNQDRIEKILTFRIPYYVGPLARGKSDFAWLSRKSADKITPWNFDEIVDKESSAEAFINRMTNYDLYLPNQKVLPKHSLLYEKFTVYNELTKVKYKTEQGKTAFFDANMKQEIFDGVFKVYRKVTKDKLMDFLEKEFDEFRIVDLTGLDKENKAFNASYGTYHDLRKILDKDFLDNSKNEKILEDIVLTLTLFEDREMIRKRLENYSDLLTKEQVKKLERRHYTGWGRLSAELIHGIRNKESRKTLLDYLIDDGNSNRNFMQLINDDALSFKEEIAKAQVIGETDNLNQVVSDIAGSPAIKKGILQSLKIVDELVKIMGHQPENIVVEMARENQFTNQGRRNSQQRLKGLTDSIKEFGSQILKEHPVENSQLQNDRLFLYYLQNGRDMYTGEELDIDYLSQYDIDHIIPQAFIKDNSIDNRVLTSSKENRGKSDDVPSKDVVRKMKPYWSKLLSAKLITQRKFDNLTKAERGGLTDDDKAGFIKRQLVETRQITKHVARILDERFNTETDENNKKIRQVKIVTLKSNLVSNFRKEFELYKVREINDYHHAHDAYLNAVIGKALLGVYPQLEPEFVYGDYPHFHGHEENKATAKKFFYSNIMNFFKKDDVRTDKNGEIIWKKDEHISNIKKVLSYPQVNIVKKVEEQTGGFSKESILPKGNSDKLIPRKTKKFYWDTKKYGGFDSPIVAYSILVIADIEKGKSKKLKTVKALVGVTIMEKMTFERDPVAFLERKGYRNVQEENIIKLPKYSLFKLENGRKRLLASARELQKGNEIVLPNHLGTLLYHAKNIHKVDEPKHLDYVDKHKDEFKELLDVVSNFSKKYTLAEGNLEKIKELYAQNNGEDLKELSSSFINLLTFTAIGAPAAFKFFDKNIDRKRYTSTTEILNATLIHQSITGLYETRIDLSKLGGD

SEQ ID NO: 1212 - protein, 1345 aa, Streptococcus mutans
MKKPYSIGLDIGTNSVGWAVVTDDYKVPAKKMKVLGNTDKSHIKKNLLGALLFDSGNTAADRRLKRTARRRYTRRRNRILYLQEIFAEEMSKVDDSFFHRLEDSFLVTEDKRGERHPIFGNLEEEVKYHENFPTIYHLRQYLADNPEKVDLRLVYLALAHIIKFRGHFLIEGKFDTRNNDVQRLFQEFLAVYDNTFENSSLQEQNVQVEEILTDKISKSAKKDRVLKLFPNEKSNGRFAEFLKLIVGNQADFKKHFELEEKAPLQFSKDTYEEELEVLLAQIGDNYAELFLSAKKLYDSILLSGILTVTDVSTKAPLSASMIQRYNEHQMDLAQLKQFIRQKLSDKYNEVFSDVSKDGYAGYIDGKTNQEAFYKYLKGLLNKIEGSGYFLDKIEREDFLRKQRTFDNGSIPHQIHLQEMRAIIRRQAEFYPFLADNQDRIEKILTFRIPYYVGPLARGKSDFAWLSRKSADKITPWNFDEIVDKESSAEAFINRMTNYDLYLPNQKVLPKHSLLYEKFTVYNELTKVKYKTEQGKTAFFDANMKQEIFDGVFKVYRKVTKDKLMDFLEKEFDEFRIVDLTGLDKENKAFNASYGTYHDLRKILDKDFLDNSKNEKILEDIVLTLTLFEDREMIRKRLENYSDLLTKEQVKKLERRHYTGWGRLSAELIHGIRNKESRKTILDYLIDDGNSNRNFMQLINDDALSFKEEIAKAQVIGETDNLNQVVSDIAGSPAIKKGILQSLKIVDELVKIMGHQPENIVVEMARENQFTNQGRRNSQQRLKGLTDSIKEFGSQILKEHPVEHSQLQNDRLFLYYLQNGRDMYTGEELDIDYLSQYDIDHIIPQAFIKDNSIDNRVLTSSKENRGKSDDVPSKNVVRKMKSYWSKLLSAKLITQRKFDNLTKAERGGLTDDDKAGFIKRQLVETRQITKHVARILDERFHTETDENNKKIRQVKIVTLKSNLVSNFRKEFELYKVREINDYHHAHDAYLNAVIGKALLGVYPQLEPEFVYGDYPHFHGHKENKATAKKFFYSNIMNFFKKDDVRTDKNGEIIWKKDEHISNIKKVLSYPQVNIVKKVEEQTGGFSKESILPKGNSDKLIPRKTKKFYWDTKKYGGFDSPIVAYSILVIADIEKGKSKKLKTVKALVGVTIMEKMTFERDPVAFLERKGYRNVQEENIIKLPKYSLFKLENGRKRLLASARELQKGNEIVLPNHLGTLLYHAKNIHKVDEPKHLDYVDKHKDEFKELLDVVSNFSKKYTLAEGNLEKIKELYAQNNGEDLKELASSFINLLTFTAIGAPATFKFFDKNIDRKRYTSTTEILNATLIHQSITGLYETRIDLSKLGGD

SEQ ID NO: 1213 - protein, 1345 aa, Streptococcus mutans
MKKPYSIGLDIGTNSVGWAVVTDDYKVPAKKMKVLGNTDKSHIKKNLLGALLFDSGNTAADRRLKRTARRRYTRRRNRILYLQEIFAEEMSKVDDSFFHRLEDSFLVTEDKRGERHPIFGNLEEEVKYHENFPTIYHLRQYLADNPEKVDLRLVYLALAHIIKFRGHFLIEGKFDTRNNDVQRLFQEFLAVYDNTFENSSLQEQNVQVEEILTDKISKSAKKDRVLKLFPNEKSNGRFAEFLKLIVGNQADFKKHFELEEKAPLQFSKDTYEEELEVLLAQIGDNYAELFLSAKKLYDSILLSGILTVTDVSTKAPLSASMIQRYNEHQMDLAQLKQFIRQKLSDKYNEVFSDVSKDGYAGYIDGKTNQEAFYKYLKGLLNKIEGSGYFLDKIEREDFLRKQRTFDNGSIPHQIHLQEMRAIIRRQAEFYPFLADNQDRIEKILTFRIPYYVGPLARGKSDFAWLSRKSADKITPWNFDEIVDKESSAEAFINRMTNYDLYLPNQKVLPKHSLLYEKFTVYNELTKVKYKTEQGKTAFFDANMKQEIFDGVFKVYRKVTKDKLMDFLEKEFDEFRIVDLTGLDKENKVFNASYGTYHDLCKILDKDFLDNSKNEKILEDIVLTLTLFEDREMIRKRLENYSDLLTKEQVKKLERRHYTGWGRLSAELIHGIRNKESRKTILDYLIDDGNSNRNFMQLINDDALSFKEEIAKAQVIGETDNLNQVVSDIAGSPAIKKGILQSLKIVDELVKIMGHQPENIVVEMARENQFTKQGRRNSQQRLKGLTDSIKEFGSQILKEHPVENSQLQNDRLFLYYLQNGRDMYTGEELDIDYLSQYDIDHIIPQAFIKDNSIDNRVLTSSKENRGKSDDVPSKDVVRKMKSYWSKLLSAKLITQRKFDNLTKAERGGLTDDDKAGFIKRQLVETRQITKHVARILDERFYTETDENNKKIRQVKIVTLKSNLVSNFRKEFELYKVREINDYHHAHDAYLNAVIGKALLGVYPQLEPEFVYGDYPHFHGHKENKATAKKFFYSNIMNFFKKDDVRTDKNGEIIWKKDEHISNIKKVLSYPQVNIVKKVEEQTGGFSKESILPKGNSDKLIPRKTKKFYWDTKKYGGFDSPIVAYSILVIADIEKGKSKKLKTVKALVGVTIMEKMTFERDPVAFLERKGYRNVQEENIIKLPKYSLFKLENGRKRLLASARELQKGNEIVLPNHLGTLLYHAKNIHKVDEPKHLDYVDKHKDEFKELLDVVSNFSKKYTLAEGNLEKIKELYAQNNGEDLKELASSFINLLTFTAIGAPATFKFFDKNIDRKRYTSTTEILNATLIHQSITGLYETRIDLSKLGGD

SEQ ID NO: 1214 - protein, 1345 aa, Streptococcus mutans
MKKPYSIGLDIGTNSVGWAVVTDDYKVPAKKMKVLGNTDKSHIKKNLLGALLFDSGNTAADRRLKRTARRRYTRRRNRILYLQEIFAEEMSKVDDSFFHRLEDSFLVTEDKRGERHPIFGNLEEEVKYHENFPTIYHLRQYLADNPEKVDLRLVYLALAHIIKFRGHFLIEGKFDTRNNDVQRLFQEFLAVYDNTFENSSLQEQNVQVEEILTDKISKSAKKDRVLKLFPNEKSNGRFAEFLKLIVGNQADFKKHFELEEKAPLQFSKDTYEEELEVLLAQIGDNYAELFLSAKKLYDSILLSGILTVTDVSTKAPLSASMIQRYNEHQMDLAQLKQFIRQKLSDKYNEVFSDVSKDGYAGYIDGKTNQEAFYKYLKGLLNKIEGSGYFLDKIEREDFLRKQRTFDNGSIPHQIHLQEMRAIIRRQAEFYPFLADNQDRIEKILTFRIPYYVGPLARGKSDFAWLSRKSADKITPWNFDEIVDKESSAEAFINRMTNYDLYLPNQKVLPKHSLLYEKFTVYNELTKVKYKTEQGKTAFFDANMKQEIFDGVFKVYRKVTKDKLMDFLEKEFDEFRIVDLTGLDKENKAFNASYGTYHDLRKILDKDFLDNSKNEKILEDIVLTLTLFEDREMIRKRLENYSDLLTKEQVKKLERRHYTGWGRLSAELIHGIRNKESRKTILDYLIDDGNSNRNFMQLINDDALSFKEEIAKAQVIGETDNLNQVVSDIAGSPAIKKGILQSLKIVDELVKIMGHQPENIVVEMARENQFTNQGRRNSQQRLKGLTDSIKEFGSQILKEHPVENSQLQNDRLFLYYLQNGRDMYTGEELDIDYLSQYDIDHIIPQAFIKDNSIDNRVLTSSKENRGKSDDVPSKNVVRKMKSYWSKLLSAKLITQRKFDNLTKAERGGLTDDDKAGFIKRQLVETRQITKHVARILDERFHTETDENNKKIRQVKIVTLKSNLVSNFRKEFELYKVREINDYHHAHDAYLNAVIGKALLGVYPQLEPEFVYGDYPHFHGHKENKATAKKFFYSNIMNFFKKDDVRTDKNGEIIWKKDEHISNIKKVLSYPQVNIVKKVEEQTGGFSKESILPKGNSDKLIPRKTKKFYWDTKKYGGFDSPIVAYSILVIADIEKGKSKKLKTVKALVGVTIMEKMTFERDPVAFLERKGYRNVQEENIIKLPKYSLFKLENGRKRLLASARELQKGNEIVLPNHLGTLLYHAKNIHKVDEPKHLDYVDKHKDEFKELLDVVSNFSKKYTLAEGNLEKIKELYAQNNGEDLKELSSSFINLLTFTAIGAPAAFKFFDKNIDRKRYTSTTEILNATLIHQSITGLYETRIDLSKLGGD

SEQ ID NO: 1215 - protein, 1345 aa, Streptococcus mutans; identical to SEQ ID NO: 1211

SEQ ID NO: 1216 - protein, 1345 aa, Streptococcus mutans; identical to SEQ ID NO: 1212

SEQ ID NO: 1217 - protein, 1345 aa, Streptococcus mutans; identical to SEQ ID NO: 1213

SEQ ID NO: 1218 - protein, 1345 aa, Streptococcus mutans; identical to SEQ ID NO: 1214

SEQ ID NO: 1219 - protein, 1345 aa, Streptococcus mutans; identical to SEQ ID NO: 1212

SEQ ID NO: 1220 - protein, 1345 aa, Streptococcus mutans; identical to SEQ ID NO: 1212

SEQ ID NO: 1221 - protein, 1345 aa, Streptococcus mutans; identical to SEQ ID NO: 1212

SEQ ID NO: 1222 - protein, 1345 aa, Streptococcus mutans; identical to SEQ ID NO: 1212

SEQ ID NO: 1223 - protein, 1359 aa, Streptococcus mutans
MKKPYSIGLDIGTNSVGWAVVTDDYKVPAKKMKVLGNTDKSHIKKNLLGALLFDSGNTAEDRRLKRTARRRYTRRRNRILYLQEIFAEEMMQVDESFFQRLDDSFLVEEDKRGSRYPIFGTLKEEKKYHKEFKTIYHLREKLANSTEKADLRLVYLSLAHMIKFRGHFLIEGQLKAENTNVQALFKDFVEVYDKTVEESHLSEMTVDALSILTEKVSKSRRLENLVECYPTEKKNTLFGNLIALSLGLQPNFKTNFQLSEDAKLQFSKDTYEEDLEGLLGEIGDEYADLFASAKNLYDAILLSGILAVDDNTTKAPLSASMVKRYKEHKEELAAFKRFIKEKLPKKYEEIFKDDTKNGYAGYVGADKKLRKRSGKLATEEEFYKYVKGILNKVEGADVWLDKIDREDFLRKQRTFDNGSIPHQIHLQEMHAILRRQGEHYPFLKENQDKIEKILTFRIPYYVGPLVRKGSRFAWAEYKADEKITPWNFDDILDKEKSAEKFITRMTLNDLYLPEEKVLPKHSLLYETFTVYNELTKVKYVNEQGEAKFFDANMKQEIFDHVFKENRKVTKDKLLNYLNKEFEEFRIVNLTGLDKENKVFNSSLGTYHDLRKILNKSFLDNKENEQIIEDIIQTLTLFEDREMIRQRLQKYSDIFTKAQLKKLERRHYTGWGRLSYKLINGIRDKQSNKTILGYLIDDGYSNRNFMQLINDDALSFKEEIAKAQVIGEMDGLNQVVSDIAGSPAIKKGILQSLKIVDELVKVMGHNPANIVIEMARENQTTAKGRRSSQKRYKRLEEAIKNLDHDLNHKILKEHPTDNQALQNDRLFLYYLQNGRDMYTEDPLDINRLSDYDIDHIIPQAFIKDNSIDNRVLTRSDKNRGKSDDVPSEEVVHKMKPFWSKLLSAKLITQRKFDNLTKAERGGLTDDDKAGFIKRQLVETRQITKHVARILDERFNTETDENNKKIRQVKIVTLKSNLVSNFRKEFELYKVREINDYHHAHDAYLNAVIGKALLGVYPQLEPEFVYGDYPHFHGHKENKATAKKFFYSNIMNFFKKGDVRTDKNGEIIWKKDEHISNIKKVLSYPQVNIVKKVEEQTGGFSKESILPKGNSDKLIPRKTKKFYWDTKKYGGFDSPIVAYSILVIADIEKGKSKKLKTVKALVGVTIMEKMTFERDPVAFLERKGYRNVQEENIIKLPKYSLFKLENGRKRLLASARELQKGNEIVLPNHLETLLYHAKNIHKVDEPKHLDYVDKHKDEFKELLDVVSNFSKKYTLAEGNLEKIKELYAQNNGEDLKELASSFINLLTFTAIGAPAAFKFFDKNIDRKRYTSTTEILNATLIHQSITGLYETRIDLNKLGGD

SEQ ID NO: 1224 - protein, 1359 aa, Streptococcus mutans; identical to SEQ ID NO: 1223

SEQ ID NO: 1225 - protein, 1355 aa, Streptococcus mutans
MKKPYSIGLDIGTNSVGWAVVTDDYKVPAKKMKVLGNTDKSHIKKNLLGALLFDSGNTAEDRRLKRTARRRYTRRRNRILYLQEIFAEEMSKVDDSFFHRLDESFLTDDDKNFDSHPIFGNKAEEDAYHQKFPTIYHLRKHLADSTEKADLRLVYLALAHMIKFRGHFLIEGELNAENTDVQKLFADFVGVYDRTFDDSHLSEITVDASSILTEKISKSRRLEKLINNYPKEKKNTLFGNLIALSLGLQPNFKTNFKLSEDAKLQFSKDTYEEDLEELLGKIGDDYADLFTLAKNLYDAILLSGILTADDSSTKAPLSASMIKRYAEHHEDLEKLKEFIKANKPELYHDIFKDETKNGYAGYIENGVKQDEFYKYLKNTLSKITGSDYFLDQIEREDFLRKQRTFDNGSIPHQIHLQEMHAILRRQGDYYPFLKENQDRIEKILTFRIPYYVGPLARKNSRFAWAEYHSDEAVTPWNFDQVIDKESSAQAFIEHMTNNDLYLPNEKVLPKHSPLYEKYTVYNELTKIKYVTEIGEAKFFDANLKQEIFDGLFKHERKVTKKKLRTFLDKNFDEFRIVDIQGLDKETETFNASYATYQDLLKVIKDKVFMDNPENAEILENIVLTLTLFEDREMIKQRLAKYADVFDKKVIDQLARRHYTGWGRLSAKLLNGIRDKQSCKTIMDYLIDDAQSNRNLMQLITDDNLTFKDDIVKAQYVDNSDDLHQVVQSLAGSPAIKKGILQSLKIVDELVKVMGKEPEQIVVEMARENQTTAKGRRNSQQRYKRLKEAIKSLDRDLNHKILKEHPTDNQALQNNRLFLYYLQNGRDMYTGESLDINRLSDYDIDHVIPQAFIKDNSIDNRVLTSSKANRGKSDDVPSEDVVNRMRPFWNKLLSSGLISQRKYNNLTKKELTLDDKAGFIKRQLVETRQITKHVARMLDERFNKEFDDNNKRIRRVKIVTLKSNLVSSFRKEFELYKVREINDYHHAHDAYLNAVVVKALLVKYPKLEPEFVYGEYPKYNSYRERKTATQKMFFYSNIMNMFKSKVKLADDQIVERPMIEVNDETGEIAWDKTKHITTVKKVLSYPQVNIVKKVEEQTIGQNGGLFDDNPKSPLEVIPSKLVPLKKALNPEKYGGYQKPTTAYPILLIVDTKQLIPISVMDKKRFEQNPVKFLKDKGYQQIEKNNFVKLPKYTLVDIGNGIKRLWASSKEVHKGNQLVVSKKSQDLLYHAHHLDNDYSNEYVKNHYQQFDILFNEITSFSKKCKLGKEHIQKIEEAYSKERDFASIEELADGFIKLLGFTQLGATSPFSFLGIKLNQKQYTGKKDYLLPCMEATLIHQSITGLYETRIDLSKLGGD

SEQ ID NO: 1226 - protein, 1355 aa, Streptococcus mutans; identical to SEQ ID NO: 1225

SEQ ID NO: 1227 - protein, 1345 aa, Streptococcus mutans
MKKPYSIGLDIGTNSVGWAVVTDDYKVPAKKMKVLGNTDKSHIKKNLLGALLFDSGNTAEDRRLKRTARRRYTRRRNRILYLQEIFSEEMDKVDDSFFHRLEDSFLVTEDKRGERHPIFGNLEEEVKYHENFPTIYHLRQYLADNPEKVDLRLVYLALAHIIKFRGHFLIEGKFDTRNNDVQRLFQEFLAVYDNTFENSSLQEQNVQVEEILTDKISKSAKKDRVLKLFPNEKSNGRFAEFLKLIVGNQADFKKHFELEEKAPLQFSKDTYEEELEVLLAQIGDNYAELFLSAKKLYDSILLSGILTVTDVSTKAPLSASMIQRYNEHQMDLAQLKQFIRQKLSDKYNEVFSDVSKDGYAGYIDGKTNQEAFYKYLKGLLNKIEGSGYFLDKIEREDFLRKQRTFDNGSIPHQIHLQEMRAIIRRQAEFYPFLADNQDRIEKILTFRIPYYVGPLARGKSDFAWLSRKSADKITPWNFDEIVDKESSAEAFINRMTNYDLYLPNQKVLPKHSLLYEKFTVYNELTKVKYKTEQGKTAFFDANMKQEIFDGVFKVYRKVTKDKLMDFLEKEFDEFRIVDLTGLDKENKVFNASYGTYHDLCKILDKDFLDNSKNEKILEDIVLTLTLFEDREMIRKRLENYSDLLTKEQVKKLERRHYTGWGRLSAELIHGIRNKESRKTILDYLIDDGNSNRNFMQLINDDALSFKEEIAKAQVIGETDNLNQVVSDIAGSPAIKKGILQSLKIVDELVKIMGHQPENIVVEMARENQFTKQGRRNSQQRLKGLTDSIKEFGSQILKEHPVENSQLQNDRLFLYYLQNGRDMYTGEELDIDYLSQYDIDHIIPQAFIKDNSIDNRVLTSSKENRGKSDDVPSKDVVRKMKSYWSKLLSAKLITQRKFDNLTKAERGGLTDDDKAGFIKRQLVETRQITKHVARILDERFYTETDENNKKIRQVKIVTLKSNLVSNFRKEFELYKVREINDYHHAHDAYLNAVIGKALLGVYPQLEPEFVYGDYPHFHGHKENKATAKKFFYSNIMNFFKKDDVRTDKNGEIIWKKDEHISNIKKVLSYPQVNIVKKVEEQTGGFSKESILPKGNSDKLIPRKTKKFYWDTKKYGGFDSPIVAYSILVIADIEKGKSKKLKTVKALVGVTIMEKMTFERDPVAFLERKGYRNVQEENIIKLPKYSLFKLENGRKRLLASARELQKGNEIVLPNHLGTLLYHAKNIHKVDEPKHLDYVDKHKDEFKELLDVVSNFSKKYTLAEGNLEKIKELYAQNNGEDLKELASSFINLLTFTAIGAPATFKFFDKNIDRKRYTSTTEILNATLIHQSITGLYETRIDLSKLGGD

SEQ ID NO: 1228 - protein, 1345 aa, Streptococcus mutans; identical to SEQ ID NO: 1227

SEQ ID NO: 1229 - protein, 1345 aa, Streptococcus mutans
MKKPYSIGLDIGTNSVGWAVVTDDYKVPAKKMKVLGNTDKSHIKKNLLGALLFDSGNTAEDRRLKRTARRRYTRRRNRILYLQEIFSEEMGKVDDSFFHRLDESFLTDDDKNFDSHPIFGNKAEEDAYHQKFPTIYHLRKHLADSTEKADLRLVYLALAHMIKFRGHFLIEGELNAENTDVQKLFADFVGVYDRTFDDSHLSEITVDASSILTEKISKSRRLEKLINNYPKEKKNTLFGNLIALSLGLQPNFKTNFKLSEDAKLQFSKDTYEEELEVLLAQIGDNYAELFLSAKKLYDSILLSGILTVTDVSTKAPLSASMIQRYNEHQMDLAQLKQFIRQKLSDKYNEVFSDVSKDGYAGYIDGKTNQEAFYKYLKGLLNKIEGSGYFLDKIEREDFLRKQRTFDNGSIPHQIHLQEMRAIIRRQAEFYPFLADNQDRIEKILTFRIPYYVGPLARGKSDFAWLSRKSADKITPWNFDEIVDKESSVEAFINRMTNYDLYLPNQKVLPKHSLLYEKFTVYNELTKVKYKTEQGKTAFFDANMKQEIFDGVFKVYRKVTKDKLMDFLEKEFDEFRIVDLTGLDKENKAFNASYGTYHDLRKILDKDFLDNSKNEKILEDIVLTLTLFEDREMIRKRLKNYSDLLTKEQLKKLERRHYTGWGRLSAELIHGIRNKESRKTILDYLIDDGNSNRNFMQLINDDALSFKEEIAKAQVIGETDNLNQVVSDIAGSPAIKKGILQSLKIVDELVKIMGHQPENIVVEMARENQFTNQGRRNSQQRLKGLTDSIKEFGSQILKEHPVENSQLQNDRLFLYYLQNGRDMYTGEELDIDYLSQYDIDHIIPQAFIKDNSIDNRVLTSSKENRGKSDDVPSKDVVRKMKSYWSKLLSAKLITQRKFDNLTKGERGGLTDDDKAGFIKRQLVETRQITKHVARILDERFNTETDENNKKIRQVKIVTLKSNLVSNFRKEFELYKVREINDYHHAHDAYLNAVIGKALLGVYPQLEPEFVYGDYPHFHGHKENKATAKKFFYSNIMNFFKKDDVRTDKNGEIIWKKDEYISNIKKVLSYPQVNIVKKVEEQTGGFSKESILPKGDSDKLIPRKTKKFYWDTKKYGGFDSPIVAYSILVIADIEKGKSKKLKTVKALVGVTIMEKMTFERDPVAFLERKGYRNVQEENIIKLPKYSLFKLENGRKRLLASARELQKGNEIVLPNHLGTLLYHAKNIHKVDEPKHLDYVDKHKDEFKELLDVVSNFSKKYTLAEGNLEKIKELYAQNNGEDLKELASSFINLLTFTAIGAPATFKFFDKNIDRKRYTSTTEILNATLIHQSITGLYETRIDLSKLGGD

SEQ ID NO: 1230 - protein, 1345 aa, Streptococcus mutans
MKKPYSIGLDIGTNSVGWAVVTDDYKVPAKKMKVLGNTDKSHIKKNLLGALLFDSGNTAEDRRLKRTARRRYTRRRNRILYLQEIFSEEMGKVDDSFFHRLDESFLTDDDKNFDSYPIFGNKAEEDAYHQKFPTIYHLRKHLADSTEKADLRLVYLALAHMIKFRGHFLIEGELNAENTDVQKLFADFVGVYDRTFDDSHLSEITVDASSILTEKISKSRRLEKLINNYPKEKKNTLFRNLVALSLGLQPNFKTNFKLSEDAKLQFSKDTYEEDLEELLGKIGDDYADLFTLAKNLYDAILLSGILTADDSSTKAPLSASMIKRYAEHHEDLEKLKEFIKANKPELYHDIFKDETKNGYAGYIENGVKQDEFYKYLKNTLSKIAGSDYFLDKIEREDFLRKQRTFDNGSIPHQIHLQEMHAILRRQGDYYPFLKENQDRIEKILTFRIPYYVGPLARGKSDFAWLSRKSADKITPWNFDEIVDKESSVEAFINRMTNYDLYLPNQKVLPKHSLLYEKFTVYNELTKVKYKTEQGKTAFFDANMKQEIFDGVFKVYRKVTKDKLMDFLEKEFDEFRIVDLTGLDKENKAFNASYGTYHDLRKILDKDFLDNSKNEKILEDIVLTLTLFEDREMIRKRLKNYSDLLTKEQLKKLERRHYTGWGRLSAELIHGIRNKESRKTILDYLIDDGNSNRNFMQLINDDALSFKEEIAKAQVIGETDNLNQVVSDIAGSPAIKKGILQSLKIVDELVKIMGHQPENIVVEMARENQFTNQGRRNSQQRLKGLTDSIKEFGSQILKEHPVENSQLQNDRLFLYYLQNGRDMYTGEELDIDYLSQYDIDHIIPQAFIKDNSIDNRVLTSSKENRGKSDDVPSKDVVRKMKSYWSKLLSAKLITQRKFDNLTKGERGGLTDDDKAGFIKRQLVETRQITKHVARILDERFNTETDENNKKIRQVKIVTLKSNLVSNFRKEFELYKVREINDYHHAHDAYLNAVIGKALLGVYPQLEPEFVYGDYPHFHGHKENKATAKKFFYSNIMNFFKKDDVRTDKNGEIIWKKDEYISNIKKVLSYPQVNIVKKVEEQTGGFSKESILPKGDSDKLIPRKTKKFYWDTKKYGGFDSPIVAYSILVIADIEKGKSKKLKTVKALVGVTIMEKMTFERDPVAFLERKGYRNVQEENIIKLPKYSLFKLENGRKRLLASARELQKGNEIVLPNHLGTLLYHAKNIHKVDEPKHLDYVDKHKDEFKELLDVVSNFSKKYTLAEGNLEKIKELYAQNNGEDLKELASSFINLLTFTAIGAPATFKFFDKNIDRKRYTSTTEILNATLIHQSITGLYETRIDLSKLGGD

SEQ ID NO: 1231 - protein, 1345 aa, Streptococcus mutans; identical to SEQ ID NO: 1230

SEQ ID NO: 1232 - protein, 1345 aa, Streptococcus mutans
MKKPYSIGLDIGTNSVGWAVVTDDYKVPAKKMKVLGNTDKSHIKKNLLGALLFDSGNTAEDRRLKRTARRRYTRRRNRILYLQEIFSEEMGKVDDSFFHRLEDSFLVTEDKRGERHPIFGNLEEEVKYHENFPTIYHLRQYLADNPEKTDLRLVYLALAHIIKFGGHFLIEGKFDTRNNDVQRLFQEFLAVYDNTFENSSLQEQNVQVEEILTDKISKSAKKDRVLKLFPNEKSNGRFAEFLKLIVGNQADFKKHFELEEKAPLQFSKDIYEEELEVLLAQIGDNYAELFLSAKKLYDSILLSGILTVTDVSTKAPLSASMIQRYNEHQMDLAQLKQFIRQKLSDKYNEVFSDVSKDGYAGYIDGKTNQEAFYKYLKGLLNKIEGSGYFLDKIEREDFLRKQRTFDNGSIPHQIHLQEMRAIIRRQAEFYPFLADNQDRIEKILTFRIPYYVGPLARGKSDFAWLSRKSADKITPWNFDEIVDKESSVEAFINRMTNYDLYLPNQKVLPKHSLLYEKFTVYNELTKVKYKTEQGKTAFFDANMKQEIFDGVFKVYRKVTKDKLMDFLEKEFDEFRIVDLTGLDKENKAFNASYGTYHDLRKILDKDFLDNSKNEKILEDIVLTLTLFEDREMIRKRLKNYSDLLTKEQLKKLERRHYTGWGRLSAELIHGIRNKESRKTILDYLIDDGNSNRNFMQLINDDALSFKEEIAKAQVIGETDNLNQVVSDIAGSPAIKKGILQSLKIVDELVKIMGHQPENIVVEMARENQFTNQGRRNSQQRLKGLTDSIKEFGSQILKEHPVENSQLQNDRLFLYYLQNGRDMYTGEELDIDYLSQYDIDHIIPQAFIKDNSIDNRVLTSSKENRGKSDDVPSKNVVRKMKSYWSKLLSAKLITQRKFDNLTKAERGGLTDDDKAGFIKRQLVETRQITKHVARILDERFHTETDENNKKIRQVKIVTLKSNLVSNFRKEFELYKVREINDYHHAHDAYLNAVIGKALLGVYPQLEPEFVYGDYPHFHGHKENKATAKKFFYSNIMNFFKKDDVRTDKNGEIIWKKDEHISNIKKVLSYPQVNIVKKVEEQTGGFSKESILPKGNSDKLIPRKTKKFYWDTKKYGGFDSPIVAYSILVIADIEKGKSKKLKTVKALVGVTIMEKMTFERDPVAFLERKGYRNVQEENIIKLPKYSLFKLENGRKRLLASARELQKGNEIVLPNHLGTLLYHAKNIHKVDEPKHLDYVDKHKDEFKELLDVVSNFSKKYTLAEGNLEKIKELYAQNNGEDLKELASSFINLLTFTAIGAPATFKFFDKNIDRKRYTSTTEILNATLIHQSITGLYETRIDLSKLGGD

SEQ ID NO: 1233 - protein, 1345 aa, Streptococcus mutans; identical to SEQ ID NO: 1232

SEQ ID NO: 1234 - protein, 1345 aa, Streptococcus mutans
MKKPYSIGLDIGTNSVGWAVVTDDYKVPAKKMKVLGNTDKSHIKKNLLGALLFDSGNTAEDRRLKRTARRRYTRRRNRILYLQEIFSEEMGKVDDSFFHRLEDSFLVTEDKRGERHPIFGNLEEEVKYHENFPTIYHLRQYLADNPEKTDLRLVYLALAHIIKFRGHFLIEGKFDTRNNDVQRLFQEFLAVYDNTFENSSLQEQNVQVEEILTDKISKSAKKDRVLKLFPNEKSNGRFAEFLKLIVGNQADFKKHFELEEKAPLQFSKDIYEEELEVLLAQIGDNYAELFLSAKKLYDSILLSGILTVTDVSTKAPLSASMIQRYNEHQMDLAQLKQFIRQKLSDKYNEVFSDVSKDGYAGYIDGKTNQEAFYKYLKGLLNKIEGSGYFLDKIEREDFLRKQRTFDNGSIPHQIHLQEMRAIIRRQAEFYPFLADNQDRIEKILTFRIPYYVGPLARGKSDFAWLSRKSADKITPWNFDEIVDKESSVEAFINRMTNYDLYLPNQKVLPKHSLLYEKFTVYNELTKVKYKTEQGKTAFFDANMKQEIFDGVFKVYRKVTKDKLMDFLEKEFDEFRIVDLTGLDKENKAFNASYGTYHDLRKILDKDFLDNSKNEKILEDIVLTLTLFEDREMIRKRLKNYSDLLTKEQLKKLERRHYTGWGRLSAELIHGIRNKESRKTILDYLIDDGNSNRNFMQLINDDALSFKEEIAKAQVIGETDNLNQVVSDIAGSPAIKKGILQSLKIVDELVKIMGHQPENIVVEMARENQFTNQGRRNSQQRLKGLTDSIKEFGSQILKEHPVENSQLQNDRLFLYYLQNGRDMYTGEELDIDYLSQYDIDHIIPQAFIKDNSIDNRVLTSSKENRGKSDDVPSKNVVRKMKSYWSKLLSAKLITQRKFDNLTKAERGGLTDDDKAGFIKRQLVETRQITKHVARILDERFHTETDENNKKIRQVKIVTLKSNLVSNFRKEFELYKVREINDYHHAHDAYLNAVIGKALLGVYPQLEPEFVYGDYPHFHGHKENKATAKKFFYSNIMNFFKKDDVRTDKNGEIIWKKDEHISNIKKVLSYPQVNIVKKVEEQTGGFSKESILPKGNSDKLIPRKTKKFYWDTKKYGGFDSPIVAYSILVIADIEKGKSKKLKTVKALVGVTIMEKMTFERDPVAFLERKGYRNVQEENIIKLPKYSLFKLENGRKRLLASARELQKGNEIVLPNHLGTLLYHAKNIHKVDEPKHLDYVDKHKDEFKELLDVVSNFSKKYTLAEGNLEKIKELYAQNNGEDLKELASSFINLLTFTAIGAPATFKFFDKNIDRKRYTSTTEILNATLIHQSITGLYETRIDLSKLGGD

SEQ ID NO: 1235 - protein, 1345 aa, Streptococcus mutans
MKKPYSIGLDIGTNSVGWAVVTDDYKVPAKKMKVLGNTDKSHIKKNLLGALLFDSGNTAEDRRLKRTARRRYTRRRNRILYLQEIFSEEMGKVDDSFFHRLEDSFLVTEDKRGERHPIFGNLEEEVKYHENFPTIYHLRQYLADNPEKTDLRLVYLALAHIIKFRGHFLIEGKFDTRNNDVQRLFQEFLAVYDNTFENSSLQEQNVQVEEILTDKISKSAKKDRVLKLFPNEKSNGRFAEFLKLIVGNQADFKKHFELEEKAPLQFSKDIYEEELEVLLAQIGDNYAELFLSAKKLYDSILLSGILTVTDVSTKAPLSASMIQRYNEHQMDLAQLKQFIRQKLSDKYNEVFSDVSKDGYAGYIDGKTNQEAFYKYLKGLLNKIEGSGYFLDKIEREDFLRKQRTFDNGSIPHQIHLQEMRAIIRRQAEFYPFLADNQDRIEKILTFRIPYYVGPLARGKSDFAWLSRKSADKITPWNFDEIVDKESSVEAFINRMTNYDLYLPNQKVLPKHSLLYEKFTVYNELTKVKYKTEQGKTAFFDANMKQEIFDGVFKVYRKVTKDKLMDFLEKEFDEFRIVDLTGLDKENKAFNASYGTYHDLRKILDKDFLDNSKNEKILEDIVLTLTLFEDREMIRKRLKNYSDLLTKEQLKKLERRHYTGWGRLSAELIHGIRNKESRKTILDYLIDDGNSNRNFMQLINDDALSFKEEIAKAQVIGETDNLNQVVSDIAGSPAIKKGILQSLKIVDELVKIMGHQPENIVVEMARENQFTNQGRRNSQQRLKGLTDSIKEFGSQILKEHPVENSQLQNDRLFLYYLQNGRDMYTGEELDIDYLSQYDIDHIIPQAFIKDNSIDNRVLTSSKENRGKSDDVPSKDVVRKMKSYWSKLLSAKLITQRKFDNLTKAERGGLTDDDKAGFIKRQLVETRQITKHVARILDERFNTETDENNKKIRQVKIVTLKSNLVSNFRKEFELYKVREINDYHHAHDAYLNAVIGKALLGVYPQLEPEFVYGDYPHFHGHKENKATAKKFFYSNIMNFFKKDDVRTDKNGEIIWKKDEHISNIKKVLSYPQVNIVKKVEEQTGGFSKESILPKGNSYKLIPRKTKKFYWDTKKYGGFDSPIVAYSILVIADIEKGKSKKLKTVKALVGVTIMEKMTFERDPVAFLERKGYRNVQEENIIKLPKYSLFKLENGRKRLLASARELQKGNEIVLPNHLGTLLYHAKNIHKVDEPKHLDYVDKHKDEFKELLDVVSNFSKKYTLAEGNLEKIKELYAQNNGEDLKELASSFINLLTFTAIGAPAAFKFFDKNIDRKRYTSTTEILNATLIHQSITGLYETRIDLSKLGGD

SEQ ID NO: 1236 - protein, 1345 aa, Streptococcus mutans
MKKPYSIGLDIGTNSVGWAVVTDDYKVPAKKMKVLGNTDKSHIKKNLLGALLFDSGNTAEDRRLKRTARRRYTRRRNRILYLQEIFSEEMGKVDDSFFHRLEDSFLVTEDKRGERHPIFGNLEEEVKYHENFPTIYHLRQYLADNPEKTDLRLVYLALAHIIKFRGHFLIEGKFDTRNNDVQRLFQEFLAVYDNTFENSSLQEQNVQVEEILTDKISKSAKKDRVLKLFPNEKSNGRFAEFLKLIVGNQADFKKHFELEEKAPLQFSKDIYEEELEVLLAQIGDNYAELFLSAKKLYDSILLSGILTVTDVSTKAPLSASMIQRYNEHQMDLAQLKQFIRQKLSDKYNEVFSDVSKDGYAGYIDGKTNQEAFYKYLKGLLNKIEGSGYFLDKIEREDFLRKQRTFDNGSIPHQIHLQEMRAIIRRQAEFYPFLADNQDRIEKILTFRIPYYVGPLARGKSDFAWLSRKSADKITPWNFDEIVDKESSAEAFINRMTNYDLYLPNQKVLPKHSLLYEKFTVYNELTKVKYKTEQGKTAFFDANMKQEIFDGVFKVYRKVTKDKLMDFLEKEFDEFRIVDLTGLDKENKAFNASYGTYHDLRKILDKDFLDNSKNEKILEDIVLTLTLFEDREMIRKRLKNYSDLLTKEQLKKLERRHYTGWGRLSAELIHGIRNKESRKTILDYLIDDGNSNRNFMQLINDDALSFKEEIAKAQVIGETDNLNQVVSDIAGSLAIKKGILQSLKIVDELVKIMGHQPENIVVEMARENQFTNQGRRNSQQRLKGLTDSIKEFGSQILKEHPVENSQLQNDRLFLYYLQNGRDMYTGEELDIDYLSQYDIDHIIPQAFIKDNSIDNRVLTSSKENRGKSDDVPSKDVVRKMKSYWSKLLSAKLITQRKFDNLTKGERGGLTDDDKAGFIKRQLVETRQITKHVARILDERFNTETDENNKKIRQVKIVTLKSNLVSNFRKEFELYKVREINDYHHAHDAYLNAVIGKALLGVYPQLEPEFVYGDYPHFHGHKENKATAKKFFYSNIMNFFKKDDVRTDKNGEIIWKKDEYISNIKKVLSYPQVNIVKKVEEQTGGFFKESILPKGDSDKLIPRKTKKFYWDTKKYGGFDSPIVAYSILVIADIEKGKSKKLKTVKALVGVTIMEKMTFERDPVAFLERKGYRNVQEENIIKLPKYSLFKLENGRKRLLASARELQKGNEIVLPNHLGTLLYHAKNIHKVDEPKHLDYVDKHKDEFKELLDVVSNFSKKYTLAEGNLEKIKELYAQNNGEDLKELASSFINLLTFTAIGAPATFKFFDKNIDRKRYTSTTEILNATLIHQSITGLYETRIDLSKLGGD

SEQ ID NO: 1237 - protein, 1345 aa, Streptococcus mutans
MKKPYSIGLDIGTNSVGWAVVTDDYKVPAKKMKVLGNTDKSHIKKNLLGALLFDSGNTAEDRRLKRTARRRYTRRRNRILYLQEIFSEEMGKVDDSFFHRLEDSFLVTEDKRGERHPIFGNLEEEVKYHENFPTIYHLRQYLADNPEKTDLRLVYLALAHIIKFRGHFLIEGKFDTRNNDVQRLFQEFLAVYDNTFENSSLQEQNVQVEEILTDKISKSAKKDRVLKLFPNEKSNGRFAEFLKLIVGNQADFKKHFELEEKAPLQFSKDIYEEELEVLLAQIGDNYAELFLSAKKLYDSILLSGILTVTDVSTKAPLSASMIQRYNEHQMDLAQLKQFIRQKLSDKYNEVFSDVSKDGYAGYIDGKTNQEAFYKYLKGLLNKIEGSGYFLDKIEREDFLRKQRTFDNGSIPHQIHLQEMRAIIRRQAEFYPFLADNQDRIEKILTFRIPYYVGPLARGKSDFAWLSRKSADKITPWNFDEIVDKESSVEAFINRMTNYDLYLPNQKVLPKHSLLYEKFTVYNELTKVKYKTEQGKTAFFDANMKQEIFDGVFKVYRKVTKDKLMDFLEKEFDEFRIVDLTGLDKENKAFNASYGTYHDLRKILDKDFLDNSKNEKILEDIVLTLTLFEDREMIRKRLKNYSDLLTKEQLKKLERRHYTGWGRLSAELIHGIRNKESRKTILDYLIDDGNSNRNFMQLINDDALSFKEEIAKAQVIGETDNLNQVVSDIAGSPAIKKGILQSLKIVDELVKIMGHQPENIVVEMARENQFTNQGRRNSQQRLKGLTDSIKEFGSQILKEHPVENSQLQNDRLFLYYLQNGRDMYTGEELDIDYLSQYDIDHIIPQAFIKDNSIDNRVLTSSKENRGKSDDVPSKDVVRKMKSYWSKLLSAKLITQRKFDNLTKAERGGLTDDDKAGFIKRQLVETRQITKHVARILDERFNTETDENNKKIRQVKIVTLKSNLVSNFRKEFELYKVREINDYHHAHDAYLNAVIGKALLGVYPQLEPEFVYGDYPHFHGHKENKATAKKFFYSNIMNFFKKDDVRTDKNGEIIWKKDEHISNIKKVLSYPQVNIVKKVEEQTGGFSKESILPKGNSDKLIPRKTKKFYWDTKKYGGFDSPIVAYSILVIADIEKGKSKKLKTVKALVGVTIMEKMTFERDPVAFLERKGYRNVQEENIIKLPKYSLFKLENGRKRLLASARELQKGNEIVLPNHLGTLLYHAKNIHKVDEPKHLDYVDKHKDEFKELLDVVSNFSKKYTLAEGNLEKIKELYAQNNGEDLKELASSFINLLTFTAIGAPATFKFFDKNIDRKRYTSTTEILNATLIHQSITGLYETRIDLNKLGGD

SEQ ID NO: 1238 - protein, 1345 aa, Streptococcus mutans; identical to SEQ ID NO: 1237

SEQ ID NO: 1239 - protein, 1345 aa, Streptococcus mutans; identical to SEQ ID NO: 1234

SEQ ID NO: 1240 - protein, 1345 aa, Streptococcus mutans; identical to SEQ ID NO: 1235

SEQ ID NO: 1241 - protein, 1345 aa, Streptococcus mutans; identical to SEQ ID NO: 1236

SEQ ID NO: 1242 - protein, 1345 aa, Streptococcus mutans
MKKPYSIGLDIGTNSVGWAVVTDDYKVPAKKMKVLGNTDKSHIKKNLLGALLFDSGNTAEDRRLKRTARRRYTRRRNRILYLQEIFSEEMGKVDDSFFHRLEDSFLVTEDKRGERHPIFGNLEEEVKYHENFPTIYHLRQYLADNPEKVDLRLVYLALAHIIKFRGHFLIEGKFDTRNNDVQKLFQEFLAVYDNTFENSSLQEQNVQVEEILTDKISKSAKKDRVLKLFPNEKSNGRFAEFLKLIVGNQADFKKHFELEEKAPLQLSKDTYEEELEVLLAQIGDNYAELFLSAKKLYDSILLSGILTVTDVSTKAPLSASMIQRYNEHQMDLAQLKQFIRQKLSDKYNEVFSDVSKDGYAGYIDGKTNQEAFYKYLKGLLNKIEGSGYFLDKIEREDFLRKQRTFDNGSIPHQIHLQEMRAIIRRQAEFYPFLADNQDRIEKILTFRIPYYVGPLARGKSDFAWLSRKSADKITPWNFDEIVDKESSVEAFINRMTNYDLYLPNQKVLPKHSLLYEKFTVYNELTKVKYKTEQGKTAFFDANMKQEIFDGVFKVYRKVTKDKLMDFLEKEFDEFRIVDLTGLDKENKAFNASYGTYHDLRKILDKDFLDNSKNEKILEDIVLTLTLFEDREMIRKRLENYSDLLTKEQVKKLERRHYTGWGRLSAELIHGIRNKESRKTLLDYLIDDGNSNRNFMQLINDDALSFKEEIAKAQVIGETDNLNQVVSDIAGSPAIKKGILQSLKIVDELVKIMGHQPENIVVEMARENQFTNQGRRNSQQRLKGLTDSIKEFGSQILKEHPVENSQLQNDRLFLYYLQNGRDMYTGEELDIDYLSQYDIDHIIPQAFIKDNSIDNRVLTSSKENRGKSDDVPSKDVVRKMKSYWSKLLSAKLITQRKFDNLTKAERGGLTDDDKAGFIKRQLVETRQITKHVARILDERFNTETDENNKKIRQVKIVTLKSNLVSNFRKEFELYKVREINDYHHAHDAYLNAVIGKALLGVYPQLEPEFVYGDYPHFHGHKENKATAKKFFYSNIMNFFKKDDVRTDKNGEIIWKKDEYISNIKKVLSYPQVNIVKKVEEQTGGFSKESILPKGNSDKLIPRKTKKFYWDTKKYGGFDSPIVAYSILVIADIEKGKSKKLKTVKALVGVTIMEKMTFERDPIAFLERKGYRNVQEENIIKLPKYSLFKLENGRKRLLASARELQKGNEIVLPNHLGTLLYHAKNIHKVDEPKHLDYVDKHKDEFKELLDVVSNFSKKYTLAEGNLEKIKELYAQNNGEDLKELASSFINLLTFTAIGAPATFKFFDKNIDRKRYTSTTEILNATLIHQSITGLYETRIDLSKLGGD

SEQ ID NO: 1243 - protein, 1345 aa, Streptococcus mutans; identical to SEQ ID NO: 1242

SEQ ID NO: 1244 - protein, 1345 aa, Streptococcus mutans
MKKPYSIGLDIGTNSVGWAVVTDDYKVPAKKMKVLGNTDKSHIKKNLLGALLFDSGNTAEDRRLKRTARRRYTRRRNRILYLQEIFSEEMGKVDDSFFHRLEDSFLVTEDKRGERHPIFGNLEEEVKYHENFPTIYHLRQYLADNPEKVDLRLVYLALAHIIKFRGHFLIEGKFDTRNNDVQRLFQEFLAVYDNTFENSSLQEQNVQVEEILTDKISKSAKKDRVLKLFPNEKSNGRFAEFLKLIVGNQADFKKHFELEEKAPLQFSKDTYEEDLEELLGKIGDDYADLFTLAKNLYDAILLSGILTADDSSTKAPLSASMIQRYNEHQMDLAQLKQFIRQKLSDKYNEVFSDVSKDGYAGYIDGKTNQEAFYKYLKGLLNKIEGSGYFLDKIEREDFLRKQRTFDNGSIPHQIHLQEMRAIIRRQAEFYPFLADNQDRIEKILTFRIPYYVGPLARGKSDFAWLSRKSADKITPWNFDEIVDKESSAEAFINRMTNYDLYLPNQKVLPKHSLLYEKFTVYNELTKVKYKTEQGKTAFFDANMKQEIFDGVFKVYRKVTKDKLMDFLEKEFDEFRIVDLTGLDKENKVFNASYGTYHDLCKILDKDFLDNSKNEKILEDIVLTLTLFEDREMIRKRLENYSDLLTKEQVKKLERRHYTGWGRLSAELIHGIRNKESRKTILDYLIDDGNSNRNFMQLINDDALSFKEEIAKAQVIGETDNLNQVVSDIAGSPAIKKGILQSLKIVDELVKIMGHQPENIVVEMARENQFTNQGRRNSQQRLKGLTDSIKEFGSQILKEHPVENSQLQNDRLFLYYLQNGRDMYTGEELDIDYLSQYDIDHIIPQAFIKDNSIDNRVLTSSKENRGKSDDVPSKDVVRKMKSYWSKLLSAKLITQRKFDNLTKAERGGLTDDDKAGFIKRQLVETRQITKHVARILDERFYTETDENNKKIRQVKIVTLKSNLVSNFRKEFELYKVREINDYHHAHDAYLNAVIGKALLGVYPQLEPEFVYGDYPHFHGHKENKATAKKFFYSNIMNFFKKDDVRTDKNGEIIWKKDEHISNIKKVLSYPQVNIVKKVEEQTGGFSKESILPKGNSDKLIPRKTKKFYWDTKKYGGFDSPIVAYSILVIADIEKGKSKKLKTVKALVGVTIMEKMTFERDPVAFLERKGYRNVQEENIIKLPKYSLFKLENGRKRLLASARELQKGNEIVLPNHLGTLLYHAKNIHKVDEPKHLDYVDKHKDEFKELLDVVSNFSKKYTLAEGNLEKIKELYAQNNGEDLKELASSFINLLTFTAIGAPATFKFFDKNIDRKRYTSTTEILNATLIHQSITGLYETRIDLSKLGGD

SEQ ID NO: 1245 - protein, 1345 aa, Streptococcus mutans
MKKPYSIGLDIGTNSVGWAVVTDDYKVPAKKMKVLGNTDKSHIKKNLLGALLFDSGNTAEDRRLKRTARRRYTRRRNRILYLQEIFSEEMGKVDDSFFHRLEDSFLVTEDKRGERHPIFGNLEEEVKYHENFPTIYHLRQYLADNPEKVDLRLVYLALAHIIKFRGHFLIEGKFDTRNNDVQRLFQEFLAVYDNTFENSSLQEQNVQVEEILTDKISKSAKKDRVLKLFPNEKSNGRFAEFLKLIVGNQADFKKHFELEEKAPLQFSKDTYEEDLEELLGKIGDDYADLFTLAKNLYDAILLSGILTADDSSTKAPLSASMIQRYNEHQMDLAQLKQFIRQKLSDKYNEVFSDVSKDGYAGYIDGKTNQEAFYKYLKGLLNKIEGSGYFLDKIEREDFLRKQRTFDNGSIPHQIHLQEMRAIIRRQAEFYPFLADNQDRIEKILTFRIPYYVGPLARGKSDFAWLSRKSADKITPWNFDEIVDKESSAEAFINRMTNYDLYLPNQKVLPKHSLLYEKFTVYNELTKVKYKTEQGKTAFFDANMKQEIFDGVFKVYRKVTKDKLMDFLEKEFDEFRIVDLTGLDKENKVFNASYGTYHDLCKILDKDFLDNSKNEKILEDIVLTLTLFEDREMIRKRLENYSDLLTKEQVKKLERRHYTGWGRLSAELIHGIRNKESRKTILDYLIDDGNSNRNFMQLINDDALSFKEEIAKAQVIGETDNLNQVVSDIAGSPAIKKGILQSLKIVDELVKIMGHQPENIVVEMARENQFTNQGRRNSQQRLKGLTDSIKEFGSQILKEHPVENSQLQNDRLFLYYLQNGRDMYTGEELDIDYLSQYDIDHIIPQAFIKDNSIDNRVLTSSKENRGKSDDVPSKDVVRKMKPYWSKLLSAKLITQRKFDNLTKAERGGLTDDDKAGFIKRQLVETRQITKHVARILDERFNTETDENNKKIRQVKIVTLKSNLVSNFRKEFELYKVREINDYHHAHDAYLNAVIGKALLGVYPQLEPEFVYGDYPHFHGHEENKATAKKFFYSNIMNFFKKDDVRTDKNGEIIWKKDEHISNIKKVLSYPQVNIVKKVEEQTGGFSKESILPKGNSDKLIPRKTKKFYWDTKKYGGFDSPIVAYSILVIADIEKGKSKKLKTVKALVGVTIMEKMTFERDPVAFLERKGYRNVQEENIIKLPKYSLFKLENGRKRLLASARELQKGNEIVLPNHLGTLLYHAKNIHKVDEPKHLDYVDKHKDEFKELLDVVSNFSKKYTLAEGNLEKIKELYAQNNGEDLKELASSFINLLTFTAIGAPATFKFFDKNIDRKRYTSTTEILNATLIHQSITGLYETRIDLSKLGGD

SEQ ID NO: 1246 - protein, 1345 aa, Streptococcus mutans
MKKPYSIGLDIGTNSVGWAVVTDDYKVPAKKMKVLGNTDKSHIKKNLLGALLFDSGNTAEDRRLKRTARRRYTRRRNRILYLQEIFSEEMGKVDDSFFHRLEDSFLVTEDKRGERHPIFGNLEEEVKYHENFPTIYHLRQYLADNPEKVDLRLVYLALAHIIKFRGHFLIEGKFDTRNNDVQRLFQEFLAVYDNTFENSSLQEQNVQVEEILTDKISKSAKKDRVLKLFPNEKSNGRFAEFLKLIVGNQADFKKHFELEEKAPLQFSKDTYEEELEVLLAQIGDNYAELFLSAKKLYDSILLSGILTVTDVSTKAPLSASMIQRYNEHQMDLAQLKQFIRQKLSDKYNEVFSDVSKDGYAGYIDGKTNQEAFYKYLKGLLNKIEGSGYFLDKIEREDFLRKQRTFDNGSIPHQIHLQEMRAIIRRQAEFYPFLADNQDRIEKILTFRIPYYVGPLARGKSDFAWLSRKSADKITPWNFDEIVDKESSAEAFINRMTNYDLYLPNQKVLPKHSLLYEKFTVYNELTKVKYKTEQGKTAFFDANMKQEIFDGVFKVYRKVTKDKLMDFLEKEFDEFRIVDLTGLDKENKVFNASYGTYHDLCKILDKDFLDNSKNEKILEDIVLTLTLFEDREMIRKRLENYSDLLTKEQVKKLERRHYTGWGRLSAELIHGIRNKESRKTILDYLIDDGNSNRNFMQLINDDALSFKEEIAKAQVIGETDNLNQVVSDIAGSPAIKKGILQSLKIVDELVKIMGHQPENIVVEMARENQFTKQGRRNSQQRLKGLTDSIKEFGSQILKEHPVENSQLQNDRLFLYYLQNGRDMYTGEELDIDYLSQYDIDHIIPQAFIKDNSIDNRVLTSSKENRGKSDDVPSKDVVRKMKSYWSKLLSAKLITQRKFDNLTKAERGGLTDDDKAGFIKRQLVETRQITKHVARILDERFYTETDENNKKIRQVKIVTLKSNLVSNFRKEFELYKVREINDYHHAHDAYLNAVIGKALLGVYPQLEPEFVYGDYPHFHGHKENKATAKKFFYSNIMNFFKKDDVRTDKNGEIIWKKDEHISNIKKVLSYPQVNIVKKVEEQTGGFSKESILPKGNSDKLIPRKTKKFYWDTKKYGGFDSPIVAYSILVIADIEKGKSKKLKTVKALVGVTIMEKMTFERDPVAFLERKGYRNVQEENIIKLPKYSLFKLENGRKRLLASARELQKGNEIVLPNHLGTLLYHAKNIHKVDEPKHLDYVDKHKDEFKELLDVVSNFSKKYTLAEGNLEKIKELYAQNNGEDLKELASSFINLLTFTAIGAPATFKFFDKNIDRKRYTSTTEILNATLIHQSITGLYETRIDLSKLGGD

SEQ ID NO: 1247 - protein, 1345 aa, Streptococcus mutans
MKKPYSIGLDIGTNSVGWAVVTDDYKVPAKKMKVLGNTDKSHIKKNLLGALLFDSGNTAEDRRLKRTARRRYTRRRNRILYLQEIFSEEMGKVDDSFFHRLEDSFLVTEDKRGERHPIFGNLEEEVKYHENFPTIYHLRQYLADNPEKVDLRLVYLALAHIIKFRGHFLIEGKFDTRNNDVQRLFQEFLAVYDNTFENSSLQEQNVQVEEILTDKISKSAKKDRVLKLFPNEKSNGRFAEFLKLIVGNQADFKKHFELEEKAPLQFSKDTYEEELEVLLAQIGDNYAELFLSAKKLYDSILLSGILTVTDVSTKAPLSASMIQRYNEHQMDLAQLKQFIRQKLSDKYNEVFSDVSKDGYAGYIDGKTNQEAFYKYLKGLLNKIEGSGYFLDKIEREDFLRKQRTFDNGSIPHQIHLQEMRAIIRRQAEFYPFLADNQDRIEKILTFRIPYYVGPLARGKSDFAWLSRKSADKITPWNFDEIVDKESSAEAFINRMTNYDLYLPNQKVLPKHSLLYEKFTVYNELTKVKYKTEQGKTAFFDANMKQEIFDGVFKVYRKVTKDKLMDFLEKEFDEFRIVDLTGLDKENKVFNASYGTYHDLCKILDKDFLDNSKNEKILEDIVLTLTLFEDREMIRKRLENYSDLLTKEQVKKLERRHYTGWGRLSAELIHGIRNKESRKTILDYLIDDGNSNRNFMQLINDDALSFKEEIAKAQVIGETDNLNQVVSDIAGSPAIKKGILQSLKIVDELVKIMGHQPENIVVEMARENQFTKQGRRNSQQRLKGLTDSIKEFGSQILKEHPVENSQLQNDRLFLYYLQNGRDMYTGEELDIDYLSQYDIDHIIPQAFIKDNSIDNRVLTSSKENRGKSDDVPSKDVVRKMKSYWSKLLSAKLITQRKFDNLTKAERGGLTDDDKAGFIKRQLVETRQITKHVARILDERFYTETDENNKKIRQVKIVTLKSNLVSNFRKEFELYKVREINDYHHAHDAYLNAVIGKALLGVYPQLEPEFVYGDYPHFHGHKENKATAKKFFYSNIMNFFKKDDVRTDRNGEIIWKKDEHISNIKKVLSYPQVNIVKKVEEQTGGFSKESILPKGNSDKLIPRKTKKFYWDTKKYGGFDSPIVAYSILVIADIEKGKSKKLKTVKALVGVTIMEKMTFERDPVAFLERKGYRNVQEENIIKLPKYSLFKLENGRKRLLASARELQKGNEIVLPNHLGTLLYHAKNIHKVDEPKHLDYVDKHKDEFKELLDVVSNFSKKYTLAEGNLEKIKELYAQNNGEDLKELASSFINLLTFTAIGAPATFKFFDKNIDRKRYTSTTEILNATLIHQSITGLYETRIDLSKLGGD

SEQ ID NO: 1248 - protein, 1345 aa, Streptococcus mutans
MKKPYSIGLDIGTNSVGWAVVTDDYKVPAKKMKVLGNTDKSHIKKNLLGALLFDSGNTAEDRRLKRTARRRYTRRRNRILYLQEIFSEEMGKVDDSFFHRLEDSFLVTEDKRGERHPIFGNLEEEVKYHENFPTIYHLRQYLADNPEKVDLRLVYLALAHIIKFRGHFLIEGKFDTRNNDVQRLFQEFLAVYDNTFENSSLQEQNVQVEEILTDKISKSAKKDRVLKLFPNEKSNGRFAEFLKLIVGNQADFKKHFELEEKAPLQFSKDTYEEELEVLLAQIGDNYAELFLSAKKLYDSILLSGILTVTDVSTKAPLSASMIQRYNEHQMDLAQLKQFIRQKLSDKYNEVFSDVSKDGYAGYIDGKTNQEAFYKYLKGLLNKIEGSGYFLDKIEREDFLRKQRTFDNGSIPHQIHLQEMRAIIRRQAEFYPFLADNQDRIEKILTFRIPYYVGPLARGKSDFAWLSRKSADKITPWNFDEIVDKESSAEAFINRMTNYDLYLPNQKVLPKHSLLYEKFTVYNELTKVKYKTEQGKTAFFDANMKQEIFDGVFKVYRKVTKDKLMDFLEKEFDEFRIVDLTGLDKENKVFNASYGTYHDLCKILDKDFLDNSKNEKILEDIVLTLTLFEDREMIRKRLENYSDLLTKEQVKKLERRHYTGWGRLSAELIHGIRNKESRKTILDYLIDDGNSNRNFMQLINDDALSFKEEIAKAQVIGETDNLNQVVSDIAGSPAIKKGILQSLKIVDELVKIMGHQPENIVVEMARENQFTNQGRQNSQQRLKGLTDSIKEFGSQILKEHPVENSQLQNDRLFLYYLQNGRDMYTGEELDIDYLSQYDIDHIIPQAFIKDNSIDNRVLTSSKENRGKSDDVPSEDVVRKMKSYWSKLLSAKLITQRKFDNLTKAERGGLTDDDKAGFIKRQLVETRQITKHVARILDERFYTETDENNKKIRQVKIVTLKSNLVSNFRKEFELYKVREINDYHHAHDAYLNAVIGKALLGVYPQLEPEFVYGDYPHFHGHKENKATAKKFFYSNIMNFFKKDDVRTDKNGEIIWKKDEHISNIKKVLSYPQVNIVKKVEEQTGGFSKESILPKGNSDKLIPRKTKKFYWDTKKYGGFDSPIVAYSILVIADIEKGKSKKLKTVKALVGVTIMEKMTFERDPVAFLERKGYRNVQEENIIKLPKYSLFKLENGRKRLLASARELQKGNEIVLPNHLGTLLYHAKNIHKVDEPKHLDYVDKHKDEFKELLDVVSNFSKKYTLAEGNLEKIKELYAQNNGEDLKELASSFINLLTFTAIGAPATFKFFDKNIDRKRYTSTTEILNATLIHQSITGLYETRIDLSKLGGD

SEQ ID NO: 1249 - protein, 1345 aa, Streptococcus mutans; identical to SEQ ID NO: 1248

SEQ ID NO: 1250 - protein, 1345 aa, Streptococcus mutans; identical to SEQ ID NO: 1244

SEQ ID NO: 1251 - protein, 1345 aa, Streptococcus mutans; identical to SEQ ID NO: 1245

SEQ ID NO: 1252 - protein, 1345 aa, Streptococcus mutans; identical to SEQ ID NO: 1246

SEQ ID NO: 1253 - protein, 1345 aa, Streptococcus mutans; identical to SEQ ID NO: 1247

SEQ ID NO: 1254 - protein, 1345 aa, Streptococcus mutans; identical to SEQ ID NO: 1246

SEQ ID NO: 1255 - protein, 1345 aa, Streptococcus mutans; identical to SEQ ID NO: 1246

SEQ ID NO: 1256 - protein, 1345 aa, Streptococcus mutans; identical to SEQ ID NO: 1246

SEQ ID NO: 1257 - protein, 1345 aa, Streptococcus mutans; identical to SEQ ID NO: 1247

SEQ ID NO: 1258 - protein, 1345 aa, Streptococcus mutans
MKKPYSIGLDIGTNSVGWAVVTDDYKVPAKKMKVLGNTDKSHIKKNLLGALLFDSGNTAEDRRLKRTARRRYTRRRNRILYLQEIFSEEMGKVNDSFFHRLEDSFLVTEDKRGERHPIFGNLEEEVKYHENFPTIYHLRQYLADNPEKVDLRLVYLALAHIIKFRGHFLIEGKFDTRNNDVQRLFQEFLAVYDNTFENSSLQEQNVQVEEILTDKISKSAKKDRVLKLFPNEKSNGRFAEFLKLIVGNQADFKKHFELEEKAPLQFSKDTYEEELEVLLAQIGDNYAELFLSAKKLYDSILLSGILTVTDVSTKAPLSASMIQRYNEHQMDLAQLKQFIRQKLSDKYNEVFSDVSKDGYAGYIDGKTNQEAFYKYLKGLLNKIEGSGYFLDKIEREDFLRKQRTFDNGSIPHQIHLQEMRAIIRRQAEFYPFLADNQDRIEKILTFRIPYYVGPLARGKSDFAWLSRKSADKITPWNFDEIVDKESSAEAFINRMTNYDLYLPNQKVLPKHSLLYEKFTVYNELTKVKYKTEQGKTAFFDANMKQEIFDGVFKVYRKVTKDKLMDFLEKEFDEFRIVDLTGLDKENKVFNASYGTYHDLCKILDKDFLDNSKNEKILEDIVLTLTLFEDREMIRKRLENYSDLLTKEQVKKLERRHYTGWGRLSAELIHGIRNKESRKTILDYLIDDGNSNRNFMQLINDDALSFKEEIAKAQVIGETDNLNQVVSDIAGSPAIKKGILQSLKIVDELVKIMGHQPENIVVEMARENQFTKQGRRNSQQRLKGLTDSIKEFGSQILKEHPVENSQLQNDRLFLYYLQNGRDMYTGEELDIDYLSQYDIDHIIPQAFIKDNSIDNRVLTSSKENRGKSDDVPSKDVVRKMKSYWSKLLSAKLITQRKFDNLTKAERGGLTDDDKAGFIKRQLVETRQITKHVARILDERFYTETDENNKKIRQVKIVTLKSNLVSNFRKEFELYKVREINDYHHAHDAYLNAVIGKALLGVYPQLEPEFVYGDYPHFHGHKENKATAKKFFYSNIMNFFKKDDVRTDKNGEIIWKKDEYISNIKKVLSYPQVNIVKKVEEQTGGFSKESILPKGNSDKLIPRKTKKFYWDTKKYGGFDSPIVAYSILVIADIEKGKSKKLKTVKALVGVTIMEKMTFERDPIAFLERKGYRNVQEENIIKLPKYSLFKLENGRKRLLASARELQKGNEIVLPNHLGTLLYHAKNIHKVDEPKHLDYVDKHKDEFKELLDVVSNFSKKYTLAEGNLEKIKELYAQNNGEDLKELASSFINLLTFTAIGAPAAFKFFDKNIDRKRYTSTTEILNATLIHQSITGLYETRIDLSKLGGD

SEQ ID NO: 1259 - protein, 1345 aa, Streptococcus mutans; identical to SEQ ID NO: 1258

SEQ ID NO: 1260 - protein, 1345 aa, Streptococcus mutans
MKKPYSIGLDIGTNSVGWAVVTDDYKVPAKKMKVLGNTDKSHIKKNLLGALLFDSGNTAEDRRLKRTTRRRYTRRRNRILYLQEIFSEEMGKVDDSFFHRLEDSFLVTEDKRGERHPIFGNLEEEVKYHENFPTIYHLRQYLADNPEKTDLRLVYLALAHIIKFRGHFLIEGKFDTRNNDVQRLFQEFLAVYDNTFENSSLQEQNVQVEEILTDKISKSAKKDRVLKLFPNEKSNGCFAEFLKLIVGNQADFKKHFELEEKAPLQFSKDTYEEELEVLLAQIGDNYAELFLSAKKLYDSILLSGILTVTDVSTKAPLSASMIQRYNEHQMDLTQLKQFIRQKLSDKYNEVFSDVSKDGYAGYIDGKTNQEAFYKYLKGLLNKIEGSGYFLDKIEREDFLRKQRTFDNGSIPHQIHLQEMRAIIRRQAEFYPFLADNQDRIEKLLTFRIPYYVGPLASGKSDFAWLSRKSADKITPWNFDEIVDKESSAEAFINRMTNYDLYLPNQKVLPKHSLLYEKFTVYNELTKVKYKTEQGKTAFFDANMKQEIFDGVFKVYRKVTKDKLMDFLEKEFDEFRIVDLTGLDKENKVFNASYGTYHDLCKILDKDFLDNSKNEKILEDIVLTLTLFEDREMIRKRLENYSDLLTKEQVKKLERRHYTGWGRLSAELIHGIRNKESRKTILDYLIDDGNSNRNFMQLINDDALSFKEEIAKAQVIGETDNLNQVVSDIAGSPAIKKGILQSLKIVDELVKIMGHQPENIVVEMARENQFTNQGRRNSQQRLKGLTDSIKEFGSQILKEHPVENSQLQNDRLFLYYLQNGRDMYTGEELDIDYLSQYDIDHIIPQAFIKDNSIDNRVLTSSKENRGKSDDVPSKDVVRKMKSYWSKLLSAKLITQRKFDNLTKAERGGLTDDDKAGFIKRQLVETRQITKHVARILDERFNTETDENNKKIRQVKIVTLKSNLVSNFRKEFELYKVREINDYHHAHDAYLNAVIGKALLGVYPQLEPEFVYGDYPHFHGHKENKATAKKFFYSNIMNFFKKDDVRTDKNGEIIWKKDEHISNIKKVLSYPQVNIVKKVEEQTGGFSKESILPKGNSDKLIPRKTKKFYWDTKKYGGFDSPIVAYSILVIADIEKGKSKKLKTVKALVGVTIMEKMTFERDPVAFLERKGYRNVQEENIIKLPKYSLFKLENGRKRLLASARELQKGNEIVLPNHLGTLLYHAKNIHKVDEPKHLDYVDKHKDEFKELLDVVSNFSKKYTLAEGNLEKIKELYAQNNGEDLKELASSFINLLTFTAIGAPATFKFFDKNIDRKRYTSTTEILNATLIHQSITGLYETRIDLSKLGGD

SEQ ID NO: 1261 - protein, 1345 aa, Streptococcus mutans; identical to SEQ ID NO: 1260

SEQ ID NO: 1262 - protein, 1350 aa, Streptococcus mutans
MKKPYSIGLDIGTNSVGWAVVTDDYKVPAKKMTVLGNTDKSHIKKNLLGALLFDSGNTAADRRLKRTARRRYTRRRNRILYLQEIFAEEMSKVDDSFFHRLEDSFLVTEDKRGERHPIFGNLEEEVKYHENFPTIYHLRQYLADNPEKVDLRLVYLALAHIIKFRGHFLIEGKFDTRNNDVQRLFQEFLAVYDNTFENSSLQEQNVQVEEILTDKISKSAKKDRVLKLFPNEKSNGRFAEFLKLIVGNQADFKKHFELEEKTPLQFSKDTYEEELEVLLAQIGDNYAELFLSAKKLYDSILLSGILTVTDVSTKAPLSASMIQRYNEHQMDLAQLKQFIRQKLSDKYNEVFSDVSKDGYAGYIDGKTNQEAFYKYLKGLLNKIEGSGYFLDKIEREDFLRKQRTFDNGSIPHQIHLQEMRAIIRRQAEFYPFLADNQDRIEKILTFRIPYYVGPLARGKSDFAWLSRKSADKITPWNFDEIVDKESSAEAFINRMTNYDLYLPNQKVLPKHSLLYEKFTVYNELTKVKYKTEQGKTAFFDANMKQEIFDGVFKVYRKVTKDKLMDFLEKEFDEFRIVDLTGLDKENKAFNASYGTYHDLRKILDKDFLDNSKNEKILEDIVLTLTLFEDREMIRKRLENYSDLLTKEQVKKLERRHYTGWGRLSAELIHGIRNKESRKTILDYLIDDGNSNRNFMQLINDDALSFKEEIAKAQVIGETDNLNQVVSDIAGSPAIKKGILQSLKIVDELVKIMGHQPENIVVEMARENQFTNQGRRNSQQRLKGLTDSIKEFGSQILKEHPVENSQLQNDRLFLYYLQNGRDMYTGEELDIDYLSQYDIDHIIPQAFIKDNSIDNRVLTSSKENRGKSDDVPSEDVVNRMRPFWNKLLSSGLISQRKYNNLTKKELTPDDKAGFIKRQLVETRQITKHVARMLDERFNKEFDDNNKRIRRVKIVTLKSNLVSSFRKEFELYKVREINDYHHAHDAYLNAVVVKALLVKYPKLEPEFVYGEYPKYNSYRERKTATQKMFFYSNIMNMFKSKVKLADDQIVERPMIEVNDETGEIAWDKTKHITTVKKVLSYPQVNIVKKVEEQTIGQNGGLFDDNPKSPLEVIPSKLVPLKKALNPEKYGGYQKPTTAYPILLIVDTKQLIPISVMDKKRFEQNPVKFLKDKGYQQIEKNNFVKLPKYTLVDIGNGIKRLWASSKEVHKGNQLVVSKKSQDLLYHAHHLDNDYSNEYVKNHYQQFDILFNEITSFSKKCKLGKEHIQKIEEAYSKERDSASIEELADGFIKLLGFTQLGATSPFSFLGIKLNQKQYTGKKDYLLPCMEATLIHQSITGLYETRIDLSKLGGD

SEQ ID NO: 1263 - protein, 1350 aa, Streptococcus mutans; identical to SEQ ID NO: 1262

SEQ ID NO: 1264 - protein, 1345 aa, Streptococcus mutans
MKKPYSIGLDIGTNSVGWAVVTDDYKVPDKKMKVLGNTDKSHIKKNLLGALLFDSGNTAEDRRLKRTARRRYTRRRNRILYLQEIFSEEMGKVDDSFFHRLEDSFLVTEDKRGERHPIFGNLEEEVKYHENFPTIYHLRQYLADNPEKTDLRLVYLALAHIIKFRGHFLIEGKFDTRNNDVQRLFQEFLAVYDNTFENSSLQEQNVQVEEILTDKISKSAKKDRVLKLFPNEKSNGRFAEFLKLIVGNQADFKKHFELEEKAPLQFSKDIYEEELEVLLAQIGDNYAELFLSAKKLYDSILLSGILTVTDVSTKAPLSASMIQRYNEHQMDLAQLKQFIRQKLSDKYNEVFSDVSKDGYAGYIDGKTNQEAFYKYLKGLLNKIEGSGYFLDKIEREDFLRKQRTFDNGSIPHQIHLQEMRAIIRRQAEFYPFLADNQDRIEKILTFRIPYYVGPLARGKSDFAWLSRKSADKITPWNFDEIVDKESSVEAFINRMTNYDLYLPNQKVLPKHSLLYEKFTVYNELTKVKYKTEQGKTAFFDANMKQEIFDGVFKVYRKVTKDKLMDFLEKEFDEFRIVDLTGLDKENKAFNASYGTYHDLRKILDKDFLDNSKNEKILEDIVLTLTLFEDREMIRKRLKNYSDLLTKEQLKKLERRHYTGWGRLSAELIHGIRNKESRKTILDYLIDDGNSNRNFMQLINDDALSFKEEIAKAQVIGETDNLNQVVSDIAGSPAIKKGILQSLKIVDELVKIMGHQPENIVVEMARENQFTNQGRRNSQQRLKGLTDSIKEFGSQILKEHPVENSQLQNDRLFLYYLQNGRDMYTGEELDIDYLSQYDIDHIIPQAFIKDNSIDNRVLTSSKENRGKSDDVPSKDVVRKMKSYWSKLLSAKLITQRKFDNLTKAERGGLTDDDKAGFIKRQLVETRQITKHVARILDERFYTETDENNKKIRQVKIVTLKSNLVSNFRKEFELYKVREINDYHHAHDAYLNAVIGKALLGVYPQLEPEFVYGDYPHFHGHKENKATAKKFFYSNIMNFFKKDDVRTDKNGEIIWKKDEHISNIKKVLSYPQVNIVKKVEEQTGGFSKESILPKGNSDKLIPRKTKKFYWDTKKYGGFDSPIVAYSILVIADIEKGKSKKLKTVKALVGVTIMEKMTFERDPVAFLERKGYRNVQEENIIKLPKYSLFKLENGRKRLLASARELQKGNEIVLPNHLGTLLYHAKNIHKVDEPKHLDYVDKHKDEFKELLDVVSNFSKKYTLAEGNLEKIKELYAQNNGEDLKELASSFINLLTFTAIGAPATFKFFDKNIDRKRYTSTTEILNATLIHQSITGLYETRIDLSKLGGD

SEQ ID NO: 1265 - protein, 1345 aa, Streptococcus mutans
MKKPYSIGLDIGTNSVGWAVVTDDYKVSAKKMKVLGNTDKSHIKKNLLGALLFDSGNTAEDRRLKRTARRRYTRRRNRILYLQEIFAEEMSKVDDSFFHRLEDSFLVTEDKRGERHPIFGNLEEEVKYHENFPTIYHLRQYLADNPEKVDLRLVYLALAHIIKFRGHFLIEGKFDTRNNDVQRLFQEFLAVYDNTFENSSLQEQNVQVEEILTDKISKSAKKDRVLKLFPNEKSNGRFAEFLKLIVGNQADFKKHFELEEKAPLQFSKDTYEEELEVLLAQIGDNYAELFLSAKKLYDSILLSGILTVTDVSTKAPLSASMIQRYNEHQMDLAQLKQFIRQKLSDKYNEVFSDVSKDGYAGYIDGKTNQEAFYKYLKGLLNKIEGSGYFLDKIEREDFLRKQRTFDNGSIPHQIHLQEMRAIIRRQAEFYPFLADNQDRIEKILTFRIPYYVGPLARGKSDFAWLSRKSADKITPWNFDEIVDKESSAEAFINRMTNYDLYLPNQKVLPKHSLLYEKFTVYNELTKVKYKTEQGKTAFFDANMKQEIFDGVFKVYRKVTKDKLMDFLEKEFDEFRIVDLTGLDKENKAFNASYGTYHDLRKILDKDFLDNSKNEKILEDIVLTLTLFEDREMIRKRLENYSDLLTKEQVKKLERRHYTGWGRLSAELIHGIRNKESRKTILDYLIDDGNSNRNFMQLINDDALSFKEEIAKAQVIGETDNLNQVVSDIAGSPAIKKGILQSLKIVDELVKIMGHQPENIVVEMARENQFTNQGRRNSQQRLKGLTDSIKEFGSQILKEHPVEHSQLQNDRLFLYYLQNGRDMYTGEELDIDYLSQYDIDHIIPQAFIKDNSIDNRVLTSSKENRGKSDDVPSKNVVRKMKSYWSKLLSAKLITQRKFDNLTKAERGGLTDDDKAGFIKRQLVETRQITKHVARILDERFHTETDENNKKIRQVKIVTLKSNLVSNFRKEFELYKVREINDYHHTHDAYLNAVIGKALLGVYPQLEPEFVYGDYPHFHGHKENKATAKKFFYSNIMNFFKKDDVRTDKNGEIIWKKDEHISNIKKVLSYPQVNIVKKVEEQTGGFSKESILPKGNSDKLIPRKTKKFYWDTKKYGGFDSPIVAYSILVIADIEKGKSKKLKTVKALVGVTIMEKMTFERDPVAFLERKGYRNVQEENIIKLPKYSLFKLENGRKRLLASARELQKGNEIVLPNHLGTLLYHAKNIHKVDEPKHLDYVDKHKDEFKELLDVVSNFSKKYTLAEGNLEKIKELYAQNNGEDLKELASSFINLLTFTAIGAPATFKFFDKNIDRKRYTSTTEILNATLIHQSITGLYETRIDLSKLGGD

SEQ ID NO: 1266 - protein, 1345 aa, Streptococcus mutans; identical to SEQ ID NO: 1265

SEQ ID NO: 1267 - protein, 1345 aa, Streptococcus mutans
MKKPYSIGLDIGTNSVGWSVVTDDYKVPAKKMKVLGNTDKSHIEKNLLGALLFDSGNTAEDRRLKRTARRRYTRRRNRILYLQEIFSEEMGKVDDSFFHRLEDSFLVTEDKRGERHPIFGNLEEEVKYHENFPTIYHLRQYLADNPEKVDLRLVYLALAHIIKFRGHFLIEGKFDTRNNDVQRLFQEFLAVYDNTFENSSLQEQNVQVEEILTDKISKSAKKDRVLKLFPNEKSNGRFAEFLKLIVGNQADFKKHFELEEKAPLQFSKDTYEEELEVLLAQIGDNYAELFLSAKKLYDSILLSGILTVTDVGTKAPLSASMIQRYNEHQMDLAQLKQFIRQKLSDKYNEVFSDVSKDGYAGYIDGKTNQEAFYKYLKGLLNKIEGSGYFLDKIEREDFLRKQRTFDNGSIPHQIHLQEMRAIIRRQAEFYPFLADNQDRIEKLLTFRIPYYVGPLARGKSDFAWLSRKSADKITPWNFDEIVDKESSAEAFINRMTNYDLYLPNQKVLPKHSLLYEKFTVYNELTKVKYKTEQGKTAFFDANMKQEIFDGVFKVYRKVTKDKLMDFLEKEFDEFRIVDLTGLDKENKVFNASYGTYHDLCKILDKDFLDNSKNEKILEDIVLTLTLFEDREMIRKRLENYSDLLTKEQVKKLERRHYTGWGRLSAELIHGIRNKESRKTILDYLIDDGNSNRNFMQLINDDALSFKEEIAKAQVIGETDNLNQVVSDIAGSPAIKKGILQSLKIVDELVKIMGHQPENIVVEMARENQFTNQGRRNSQQRLKGLTDSIKEFGSQILKEHPVENSQLQNDRLFLYYLQNGRDMYTGEELDIDYLSQYDIDHIIPQAFIKDNSIDNRVLTSSKENRGKSDDVPSKDVVRKMKSYWSKLLSAKLITQRKFDNLTKAERGGLTDDDKAGFIKRQLVETRQITKHVARILDERFNTETDENNKKIRQVKIVTLKSNLVSNFRKEFELYKVREINDYHHAHDAYLNAVIGKALLGVYPQLEPEFVYGDYPHFHGHKENKATAKKFFYSNIMNFFKKDDVRIDKNGEIIWKKDEHISNIKKVLSYPQVNIVKKVEEQTGGFSKESILPKGNSDKLIPRKTKKFYWDTKKYGGFDSPIVAYSILVIADIEKGKSKKLKTVKALVGVTIMEKMTFERDPVAFLERKGYRNVQEENIIKLPKYSLFKLENGRKRLLASARELQKGNEIVLPNHLGTLLYHAKNIHKVDEPKHLDYVDKHKDEFKELLDVVSNFSKKYTLAEGNLEKIKELYAQNNGEDLKELASSFINLLTFTAIGAPATFKFFDKNIDRKRYTSTTEILNATLIHQSITGLYETRIDLSKLGGD

SEQ ID NO: 1268 - protein, 1345 aa, Streptococcus mutans; identical to SEQ ID NO: 1267

SEQ ID NO: 1269 - protein, 1355 aa, Streptococcus mutans
MKKSYSIGLDIGTNSVGWAVVTDDYKVPAKKMKVLGNTDKSHIKKNLLGALLFDSGNTAEDRRLKRTARRRYTRRRNRILYLQEIFSEEMGKVDDSFFHRLDESFLTDDDKNFDSHPIFGNKAEEDAYHQKFPTIYHLRKHLADSTEKADLRLVYLALAHMIKFRGHFLIEGELNAENTDVQKLFADFVGVYDRTFDDSHLSEITVDASSILTEKISKSRRLEKLINNYPKEKKNTLFGNLIALSLGLQPNFKTNFKLSEDAKLQFSKDTYEEDLEELLGKIGDDYADLFTLAKNLYDAILLSGILTADDSSTKAPLSASMIKRYAEHHEDLEKLKEFIKANKPELYHDIFKDETKNGYAGYIENGVKQDEFYKYLKNTLSKIAGSDYFLDKIEREDFLRKQRTFDNGSIPHQIHLQEMHAILRRQGDYYPFLKENQDRIEKILTFRIPYYVGPLARKNSRFAWAEYHSDEAVMPWNFDQVIDKESSAQAFIEHMTNNDLYLPNEKVLPKHSPLYEKYTVYNELTKIKYVTEIGEAKFFDANLKQEIFDGLFKHERKVTKKKLRTFLDKNFDEFRIVDIQGLDKETETFNASYATYQDLLKVIKDKVFMDNPENAEILENIVLTLTLFEDREMIKQRLAKYADVFDKKVIDQLARRHYTGWGRLSAKLLNGIRDKQSCKTIMDYLIDDAQSNRNLMQLITDDNLTFKDDIVKAQYVDNSDDLHQVVQSLAGSPAIKKGILQSLKIVDELVKVMGKEPEQIVVEMARENQTTAKGRRNSQQRYKRLKEAIKSLDRDLNHKILKEHPTDNQALQNNRLFLYYLQNGRDMYTGESLDINRLSDYDIDHVIPQAFIKDNSIDNRVLTSSKANRGKSDDVPSEDVVNRMRPFWNKLLSSGLISQRKYNNLTKKELTPDDKAGFIKRQLVETRQITKHVARMLDERFNKEFDDNNKRIRRVKIVTLKSNLVSSFRKEFELYKVREINDYHHAHDAYLNAVVVKALLVKYPKLEPEFVYGEYPKYNSYRERKTATQKMFFYSNIMNMFKSKVKLADDQIVERPMIEVNDETGEIAWDKTKHITTVKKVLSYPQVNIVKKVEEQTIGQNGGLFDDNPKSPLEVIPSKLVPLKKALNPEKYGGYQKPTTAYPILLIVDTKQLIPISVMDKKRFEQNPVKFLKDKGYQQIEKNNFVKLPKYTLVDIGNGIKRLWASSKEVHKGNQLVVSKKSQDLLYHAHHLDNDYSNEYVKNHYQQFDILFNEITSFSKKCKLGKEHIQKIEEAYSKERDSASIEELADGFIKLLGFTQLGATSPFSFLGIKLNQKQYTGKKDYLLPCMEATLIHQSITGLYETRIDLNKLGGD

SEQ ID NO: 1270 - protein, 1355 aa, Streptococcus mutans; identical to SEQ ID NO: 1269

SEQ ID NO: 1271 - protein, 1125 aa, Streptococcus mutans
MTNGKILGLDIGIASVGVGIINAKTGNVEHASSRIFPAANADNNVERRSARGGRRLIRRKKHRLKRVEDLFEKYNIDTDFSNLNLNPYQLRVKGLNEQLSNEELFAILKNIAKRRGISYLDDAEDDSVGSSDYAKAIDENRKLLKKQTPGEIQLKRLEKYGQLRGNFTIQDENGEYHRLINVFSTSDYVKEARRILETQSYYNKFITESFVEDYIKILQGKRKYYVGPGNEKSRTDYGIYRTDGETLDNLFGILIGKCGFYPEEYRAAKASYTAQEYNFLNDLNNLTVPTETKKLSTEQKYQLVDFAKTASTLEAAKLLKEIAKLVGCQVEEIKGYRLDNKDKPDLHTFEPFRKLKSNLTTIAVENLSITTLDTLAHILTLNTEREGIEEAIQKELPNIFSDEQITGIIAVRKKNSQIFGKGWHSFSIKLMKELIPELYETSEEQMTILIRLKKVKTNSKITNRTKYINEQEVTDEIYNPVVSKSIRQTVKIINAAIKKYGAFDQIVIEMPRESNEEDERKFIADLQKSNAKEKDDAMKQAALLYNGKAELPHGVFHGHKELATKIRLWYQQGERCLYSGKHIDIHDLIHNQHMFEIDHVLPLSLSFDDSLANKVLVYSWANQEKGQRTPFQALPQMASAWSFRELRDYISKQKGISKKKRDYLLTEQDINKVEVKQKFIERNLVDTRYVSRVVLNTLQDALKVMNKETKISVIRGQFTSQLRRQWRIDKSRETYHHHAVDALIIAASSQLRLWKKQNNPMFAEDKHGQKINLDTGEVLSDDAYKELVYQAPYQGFVNTISSKSFEDEILFSYQVDSKVNRKISDATIYATRQAQLGKDKKEETYVLGKIKDIYSQAGYDAFRKKYDKDKAVFLMYQKDPETWEKVIEVILRDYKELDDKGKEIGNPFERYKVKHGFVRKYSRKNKGTEIKSLKYYDNKLGNHIDITPNNSKHSVVLQSINPWRADLYFNPETTKYELMGLKYADLSFEKGTGKYSISREKYDEIKEREGISSKSEFKFTLYKNDLILVKDIGNHKELIARFNSKNDTSKHYVELKPWNKAKFDSEEELIPAFGKVAKSGQFIKGLNKPDLSIYKVKTDILGHKYYIKKEGDKPKLNFENKIKNK

SEQ ID NO: 1272 - protein, 1125 aa, Streptococcus mutans
MTNGKILGLDIGIASVGVGIINAKTGNVEHASSRIFPAANADNNVERRSARGGRRLIRRKKHRLKRVEDLFEKYNIDTDFSNLNLNPYQLRVKGLNEQLSNEELFAILKNIAKRRGISYLDDAEDDSVGSSDYAKAIDENRKLLKKQTPGEIQLKRLEKYGQLRGNFTIQDENGEYHRLINVFSTSDYVKEARRILETQSYYNKFITESFVEDYIKILQGKRKYYVGPGNEKSRTDYGIYRTDGETLDNLFGILIGKCGFYPEEYRAAKASYTAQEYNFLNDLNNLTVPTETKKLSTEQKYQLVDFAKTASTLGAAKLLKEIAKLVGCQVEEIKGYRLDNKDKPDLHTFEPFRKLKSNLTTIAVENLSITTLDTLAHILTLNTEREGIEEAIQKELPNIFSDEQITEIIAVRKKNSQIFGKGWHSFSIKLMKELIPELYETSEEQMTILTRLKKVKTNSKITNRTKYINEEEITDEIYNPVVSKSIRQTVKIINATIKKYGAFDQIIIEMPRESNEEDERKFIADLQKSNAKEKDDAMKQAALLYNGKDELPHDVFHGHKELATKIRLWYQQGERCLYSGKHIDIHDLIHNQHMFEIDHVLPLSLSFDDSLANKVLVYSWANQEKGQRTPFQALPQMASAWSFRELRDYISKQKGISKKKRDYLLTEQDINKVEVKQKFIERNLVDTRYVSRVVLNTLQDALKVMNKETKISVIRGQFTSQLRRQWRIDKSRETYHHHAVDALIIAASSQLRLWKKQNNPMFAEDKHGQKINLDTGEVLSDDAYKELVYQAPYQGFVNTISSKSFEDEILFSYQVDSKVNRKISDATIYATRQAQLGKDKKEETYVLGKIKDIYSQAGYDAFRKKYDKDKAVFLMYQKDPETWEKVIEVILRDYKELDDKGKEIGNPFERYKVKHGFVRKYSRKNKGTEIKSLKYYDNKLGNHIDITPNNSKHSVVLQSINPWRADLYFNPETTKYELMGLKYADLSFEKGTGKYSISREKYDEIKEREGISSKSEFKFTLYKNDLILVKDIGNHKELIARFNSKNDTSKHYVELKPWNKAKFDSEEELIPAFGKVAKSGQFIKGLNKPDLSIYKVKTDILGHKYYIKKEGDKPKLNFENKIKNK

SEQ ID NO: 1273 - protein, 1125 aa, Streptococcus mutans; identical to SEQ ID NO: 1272

SEQ ID NO: 1274 - protein, 1125 aa, Streptococcus mutans; identical to SEQ ID NO: 1271

SEQ ID NO: 1275 - protein, 670 aa, Streptococcus oralis
MAKFNKNYSIGLDIGVSSVGYAVVTEDYRVPAFKFKVLGNTEKEKIKKNLIGSTTFVPAQSAQGTRVFRVNRRRIDRRNHRIAYLRDIFQKEIGKIDKNFYRRLDESFRVLGDKSEDIQIKQPFFGNKELETAYHKKYPTIYHLRKHLADADKNSPVADIREVYMALSHIFKYRGHFLTLGKIDPNNINMQNSWIDFIESCQDAFDLEISDESKTIAAIFKSSDNRQEKVKGILSYFQPELAKKDKSIFKQLLQLLFGLKTKFKECFELEEEPDLNFSKENYDENLENLLGTLEEDFPDVFAKLKILRDTILLSDMLTYTGATHARFSATMVERYEEHRKDLQRFKSFVKQNLSEQDYLDIFGRKTPNGFDVDKETKGYVGYISNKMVLTNKQKTIQQNFYDYISGKITGIEGAEYFLNKISDGTFLRKLRTTDNGTIPNQIHAYELEKIIERQGRDYPFLLENKDKLLSILTFKIPYYVGPLAKGNNSRFAWIKRTTSQDVLDNNDEDTKNGKIRPWNYHKLINMDETRDAFITNLIGNDIILLNEKVLPKRSLIYEEVMLQNELTRIKYKDKYGKIHFFDSELRQEIINNLFKTNSKRVSSAMLLAYLENFTNLQAVEIVSGIEKGKSLNSTLKTYNDLKTIFSEDLLDSEIYQKELEEIIKVITVFV

SEQ ID NO: 1276 - protein, 1373 aa, Streptococcus oralis
MENKNYSIGLDIGTNSVGWAVITDDYKVPSKKMKVLGNTDKRFIKKNLIGALLFDEGTTAEARRLKRTARRRYTRRKNRLRYLQEIFAEEMSKVDSSFFHRLDDSFLIPEDKKGSKYPIFATLIEEKEYHKQFPTIYHLRKQLADSKEKTDLRLIYLALAHMIKYRGHFLYEDTFDIKNNDIQKIFNEFISIYNNTFEGNSLSGQNVQVEAIFTDKISKSAKRERVLKLFPDEKSTGLFSEFLKLIVGNQADFKKHFDLEEKAPLQFSRDTYDEDLENLLGQIGDDFADLFVAAKKLYDAILLSGILTVTDPSTKAPLSASMIERYENHQKDLATLKQFIKTNLPEKYDEVFSDQSKDGYAGYIDGKTTQESFYKYIKNLLSKFEGADYFLEKIEREDFLRKQRTFDNGSIPHQIHLQEMNAILRRQGEHYPFLKENKEKIEKILTFRIPYYVGPLARGNRDFAWLTRNSDQAIRPWNFEEIVDKASSAESFINKMTNYDLYLPEEKVLPKHSLLYETFAVYNELTKVKFIAEGLRDYQFLDSRQKKDIFYTLFKAEDKRKVTEKDIIQYLHTVDGYDGIELKGIEKQFNASLSTYHDLLKIIKDKEFMDDPNNEEILENIVHTLTIFEDREMIKQRLAQYDSLFDEKVIKALTRRHYTGWGKLSSKLINGIRDKQTGKTILDYLMDDGYNNRNFMQLINDDELSFKEIIKKAQVVGKTDDVKQVVQELPGSPAIKKGILQSIKLVDELVKVMGHEPESIVIEMARENQTTARGKKNSQQRYKRIEDSLKILASGLNAKILKEHPTDNIQLQNDRLFLYYLQNGRDMYTGKPLDINQLSSYDIDHIVPQAFIKDDSLDNRVLTSLKDNRGKSDNVPSLEVVEKMKTFWQQLLDSKLISYRKFNNLTKAERGGLDERDKVGFIKRQLVETRQITKHVAQILDARYNTEVNEKDKKNRTVKIITLKSNLVSNFRKEFRLYKIREINDYHHAHDAYLNAVVAKAILKKYPKLEPEFVYGDYQKYDLKRYISRSKDPKEIEKATEKYFFYSNLLNFFKEEVHYADGTIVKRENIEYSKDTGEIAWNKEKDFATIKKVLSLPQVNIVKKREVQTGGFSKESILPKGNSDKLIPRKTKDILWDTTKYGGFDSPVIAYSILLIADIEKGKAKRLKTVKTLVGITIMEKATFEKSPIAFLENKGYHNVRKENILCLPKYSLFELKNGRRRMLASAKELQKGNEIVLPVHLTTLLYHAKNIHRLDEPEHLEYIQKHRNEFKGLLNLVSEFSQKYVLADANLEKIKNLYADNEQADIEILANSFINLLTFTALGAPAAFKFFGKDVDRKRYTTVSEILNATLIHQSITGLYETRIDLSKLGED

SEQ ID NO: 1277 - protein, 1371 aa, Streptococcus oralis
MENKNYSIGLDIGTNSVGWSVITDDYKVPSKKMKVLGNTDKRFIKKNLIGALLFDEGTTAEARRLKRTARRRYTRRKNRLRYLQEIFAEEMSKVDSSFFHRLDDSFLIPEDKRGSKYPIFATLAEEKEYHKQFPTIYHLRKQLADSKEKTDLRLIYLALAHMIKYRGHFLYEDTFDIKNNDIQKIFSEFISIYDNTFEGSSLSGQNAQVEAIFTDKISKSAKRERVLKLFPDEKSTGLFSEFLKLIVGNQADFKKHFDLGEKAPLQFSKDTYDEDLENLLGQIGDDFADLFLVAKKLYDAILLSGILTVTDPSTKAPLSASMIERYENHQKDLAVLKQFIKNNLPEKYDEVFSDQSKDGYAGYIDGKTTQEAFYKYIKNLLSKFEGTDYFLEKIEREDFLRKQRTFDNGSIPHQIHLQEMNAILRRQGEHYPFLKDNKEKIEKILTFRIPYYVGPLARGNRDFAWLTRNSDEAIRPWNFEEIVDKASSAEDFINKMTNYDLYLPEEKVLPKHSLLYETFAVYNELTKVKFIAEGLRDYQFLDSGQKKQIVTQLFKEKRKVTEKDIIQFLHNVDGYDGIELKGIEKQFNASLSTYHDLLKIIKDKEFMDDSKNEEILENIVHTLTIFEDREMIKQRLAQYDSLFDEKVIKALIRRHYTGWGKLSAKLIDGICDKQTGNTILDYLIDDGKNNRNFMQLINDDGLSFKEITQKAQVVGKTDDVKQVVQELPGSPAIKKGILQSIKIVDELVKVMGHTPESIVIEMARENQTTARGKKNSQQRYKRIEDALKNLASGLDSNILKEHPTNNIQLQNDRLFLYYLQNGRDMYTGKPLDINQLSSYDIDHIVPQAFIKDDSLDNRVLTSLKDNRGKSDNVPSIEVVQKRKAFWQQLLDSKLISERKFNNLTKAERGGLDERDKVGFIKRQLVETRQITKHVAQILDARFNKEVNEKDKKNRTVKIITLKSNLVSNFRKEFRLYKVREINDYHHAHDAYLNAVVAKAILKKYPKLEPEFVYGDYQKYDLKRYISRSRNPKEVEKATEKYFFYSNLLNFFKEEVHYADGTIVKRENIEYSKDTGEIAWNKEKDFATIKKVLSYPQVNIVKKREVQTGGFSKESILPKGNSDKLIPRKTKDILWETTKYGGFDSPVIAYSILLIADIEKGKAKKLKTVKTLVGITIMEKAAFEENPITFLENKGYHNVRKENILCLPKYSLFELENGRRRLLASAKELQKGNEIVLPVYLTTLLYHSKNVHKLDEPEHLEYIQKHRNEFKDLLNLVSEFSQKYVLADANLEKIQNLYADNEQADIEILANSFINLLTFTALGAPAAFKFFGKDIDRKRYTTVSEILNATLIHQSITGLYETRIDLSKLGED

SEQ ID NO: 1278 - protein, 1121 aa, Streptococcus oralis
MNGLVLGLDIGIASVGVGILEKNSGKIIHANSRLFPAATADNNVERRKNRQARRLNRRKKHRGVRFQDLFEDYGLLTDFSKVSINLNPYRLRVDGLNQQLTNEELFIALKNIVKRRGISYLDDASEDGGAVSSDYGKAVEENRKLLAEQTPGQIQLERFEKYGQVRGDFTVVENGEKCRLINVFSTSAYRKEAEKILRKQQEFNNQITDEFIEDYLKILTGKRKYYHGPGNEKSRTDYGRFRTDGTTLDNIFGVLIGKCTFYPNEYRASKSSYTAQEFNLLNDLNNLTVPTETKKLSEEQKKVIVEYAKEAKTLGASTLLKYIVKMIDASVDQISGYRVDVNNKPEMHTFEVYRKMQSLETISVGELSRNVLDELAHILTLNTEREGIEEAINSKLMGVFSQDQVLELVQFRKNNSSLFSKGWHNFSLKLMMELIPELYETSEEQMTILTRLGKQKSKETSKRTKYIDEKELTEEIYNPVVAKSVRQAIKIINEATKKHGIFDNIVIEMARENNEEDAKKDYIKRQKANQDEKNAAMEKAAFQYNGKKELPGNIFNGHKELATKIRLWHQQGEKCLYTGKTIPISDLIHNQYKYEIDHILPLSLSFDDSLSNKVLVHATANQEKGQRTPFQALDSMDDAWSYREFKSYVKDLKSLSNKKKDYLLTEEDISKIEVKQKFIERNLVDTRYSSRVVLNALQDFYKSHQFDTTISVVRGQFTSQLRRKWGLEKSRETYHHHAVDALIIAASSQLRLWKKQNNPLITYKEGQFVDSQTGEIISLTDDEYKELVFKAPYDHFVDTLHSKTFEDGILFSYQVDSKYNRKISDATIYATRKAKLDKDKSEETYVLGKIKDIYSQAGYDAFIKIYNKDKRKFLMYHKDPQTFEKVIEEILRTYPSKERNDKNKEVPCNPFEKYRQENGPIRKYSKKGNGPEIKCLKYYDNKLGNYIDISPDGSDNQVVLQSLKPWRTDVYFNHQTKEYELMGLKYSDLSFEKGSGKYSISNEKYNSIKRIEGVNEQSEFKFTLYKNDLILIKDSENNEQKLFRFNSRNDTAKHYVELKPYDKARFDGQQELITILGNVAKGGQCLKGLNKSNISIFKVKTDVLGKKHIIKKEGDEPKLKF

SEQ ID NO: 1279 - protein, 1134 aa, Streptococcus oralis
MNGLVLGLDIGIASVGVGILEKNSGKIVHASSRIFPAATADNNVERRKNRQARRLHRRKKHRGARLKDLFEYYGLLTDFSKVSINLNPYRLRVDGLDQQLTNEELFIALKNIVKRRGISYLDDASEDGGTVSSDYGKAVEENRKLLAEQTPGQIQLERFEKYGQLRGDFTVVENSEKCRLINVFSTSAYKKEAERILRKQQEFNNQITDEFIEDYLKILTGKRKYYHGPGNEKSRTDYGRFRTDGATLDNIFGILIGKCTFYPNEYRASKASYTAQEFNLLNDLNNLTVPTETKKLSEEQKKTIIEYAKSAKTLGASTLLKYIAKMIDASVDQIRGYRVDVNNKPEMHTFEVYRKMQSLETISVGELSRNILDELAHILTLNTEREGIEEAINTKLRDSFSQDQVLELVQFRKNNSSLFSKGWHNFSLKLMMELIPELYETSEEQMTILTRLGKQKSKETSKRTKYIDEKEVTEEIYNPVVAKSVRQAIKIINEATKKHGIFDNIVIEMARENNEEDAKKDYIKRQKANQDEKYAAMEKAAFQYNGKKELPDNIFHGHKELATKIRLWHQQGEKCLYTGKSIPISDLIHNQYKYEIDHILPLSLSFDDSLSNKVLVLATANQEKGQRTPFQALDSMDDAWSYREFKSYVKESKLLGNKKKEYLLTEEDISKIEVKQKFIERNLVDTRYSSRVVLNALQDFYKNHNFDTTISVVRGQFTSQLRRKWGLEKSRETYHHHAVDALIIAASSQLRLWKKQNNPLIAYKEGQFVDSQTGEIISLTDDEYKELVFKAPYDHFVDTLSSKTFEDSILFSYQVDSKFNRKISDATIYATRKAKLDKEKKEYTYTLGKIKDIYSLGTKTPSKTGFYKFLDLYNKDKSQFLMFQKDRKTWDEVIEKIMEQYRPFKEYDKAGKLVDFNPFEKYRQENGPIRKYSKKGNGPEIKSLKYYDILLGKHKNITPEGSRNTVALLSLNPWRTDVYYNMETKKYEFLGLKYADLPFEEGGAYGISTETYNELREKEGIGKNSEFKFTLYKNDLILIKDTETNCQQFFRFWSRTGKDNPKSFEKHKIELKPYEKAKFEKGEELEVLGKVPPSSNQFQKNMQIENLSIYKVKTDVLGNKHFIKKEGDKPKLKF

SEQ ID NO: 1280 - protein, 550 aa, Streptococcus oralis
MYSLDKNGSPTPLYRDQLNQYEVDHIIPYSFLPIDSIDNKVLTHRENNQRKLDNIPDKETVANMKPFWEKLYNAKLISQTKYQRLTTSERTPDGVLTESMKAGFIERQLVETRQIIKHVARILDNRFSDTKIITLKSQLVTNFRNTFHIAKIRELNDYHHAHDAYLAVVVGQTLLKAYPKLAPELIYGHHAHFNRHEENKATIRKYLYSNIMRFFNNPDSKVSKDIWDCNRDLPIIKDIIYNSQVNFVKRTMIKKGAFYNQNPVGKFNKQIAANNRYPLKTKVSSLDTSIYGGYGPMNSALSIIIIAERFNEKKCKIETVKEFHDIFIIDYKKFNNDPFQFLNDTSENGFLKKNNINRVLAFYRVPKYSLMQKIDGTRMLFESKSNLHKATQFKLTKTQNELFFHMRRLLTKSNLMDLKSESAIKESQNFILKHKEEFDNISNQLSAFSQKMLGDTTSLKNLIKGYNERKIKEINSSEETIKYFYDNFIKMFSFVKSGAPKDINDFFNNKYTVARMRPKPDKKLLNATLIHQSITGLYETRIDLSKLGED

SEQ ID NO: 1281 - protein, 1140 aa, Streptococcus parasanguinis
MNGLVLGLDIGIASVGVGILKKDIGEIIHTNSRLFSAATADSNIERRGHRGGKRLTRRKKHRSIRLHDLFEDFGLLTDFSKVSINLNPYQLRVQGLDNQLTNEELFIALKNIVKRRGISYLDDASEDGGTVSSDYGKAVEENRKLLAEQTPGQIQLDRFEKYGQVRGDFNVVENGEKRRLINVFTTSAYSKEAERILRKQQEFNKKITDEFIEDYLTILTGKRKYYHGPGNEKSRTDYGRYTTKKDPEGKYITLDNIFGILIGKCTFYPDEYRASKASYTAQEFNLLNDLNNLTVPTETKKLSEEQKKTIIKYAKTAKTLGASTLLKYIAKLIGASVDQIHGYRIDPNKKPEMHTFETYRKMQSLETISVEELPRKVLDELAHILTLNTEREGIEEAINATLKDTFSQDQVLELVQFRKNNSSLFSKGWHSFSLKLMMELIPELYETSEEQMTILTRLGKQKSKETSKRTKYIDEKELTEEIYNPVVAKSVRQAIKIINEATKKYGIFDNIVIEMARENNEEDAKKEYIKRQKANLDEKNAAMEKAAFQYNGKKELPDNVFHGHKELATKIRLWHQQGEKCLYTGKNIPISDLIQNQYKYEIDHILPLSLSFDDSLSNKVLVLATANQEKGQRTPFQALDSMDDAWSYREFKSYVKDSKLLGNKKKEYLLTEEDISKIEVKQKFIERNLVDTRYSSRVVLNALQDFYKEHQFDTTISVVRGQFTSQLRRKWGLEKSRETYHHHAVDALIIAASSQLRLWKKQNNPLISYTEGQFVDQVTGEIISLSDDEYKELVFKAPYDHFVDTLKSKKFEDSILFSYQVDSKYNRKISDATIYATRKAKLDKENKEYTYTLGKIKDIYALGTKSPSKTGFYKFLDLYNKDKSQFLMFQKDRKTWDEVIEKIIEQYRPFKEYDENGKEVDFNPFEKYRIENGPIRKYSKKGNGPEIKSLKYYDNLLGKFVDITPSESKNPVALLSLNPWRTDVYYNTETSKYEFLGLKYADLCFEKGGAYGISEVKYNKIREKEGIGKESEFKFTLYKNDLILIKDTETNCQQIFRFWSRTGKDNPKSFEKHKIELKPYEKARFEKGEELEVLGKVPPSSNQLQKNMQIENLSIYKVKTDVLGNKHFIKKEGEEPKLKF

SEQ ID NO: 1282 - protein, 1374 aa, Streptococcus pseudoporcinus
MKKRYSYSIGLDIGTNSVGWAVINEDYKVPAKKMTVFGNTDRKTIKKNLLGTVLFDSGETAQARRLKRTNRRRYTRRRYRLCQLQNIFATEMVKVDDTFFQRLSESFFYYQDKAFDKHPIFGNSKEERAYHKTYPTIYHLRKDLADRDQKADLRLIYLALSHIIKFRGHFLIEGKLNSENTDVQKLFIALVTVYNLLFEEEPIAGETCDAKALLTAKTSKSKRLESLISEFPGQKKNGLFGNLLALALGLRPNFKSNFGLSEDAKLQITKDTYEEELDNLLAEIGDHYADLFLAAKNLSDAILLSDILTLSDENTRAPLSASMIKRYEEHQEDLALLKKLVKEQMPEKYWEIFSNAKKNGYAGYIEGKVSQEDFYRYIKPILSRLKGGDEFLAKIDRDDFLRKQRTFDNGSIPHQIHLKELHAILRRQEKYYPFLAEQKEKIEQLLCFRIPYYVGPLAKGGNSSFAWLKRRSDEPITPWNFKDVVDEEASAQAFIEGMTNYDTYLPEEKVLPKHSPLYEMFTVYNELTKVKYIAENMTKPLYLSAEQKEAIIDHLFKQTRKVTVKDLKEKYFSQIEGLENVDVTGVEGAFNASLGTYNDLLKIIKDKAFLDDEANAEILEEIVLILTLFQDEKLIEKRLAKYANLFEKSVLKKLRKRHYRGWGRLSRQLIDGMKDKASGKTILDFLKADDFANRNFIQLINDSSLDFEKLIDDAQKKAIKRESLTEAVANLAGSPAIKKGILQSLKVVDEIVKVMGHNPDNIVIEMSRENQTTAQGLKNARQRLKKIKEVHKKTGSRILEDNSERITNLTLQDNRLYLYLLQDGKDMYTGQDLDINNLSQYDIDHIIPQSFIKDNSIDNLVLTTQKANRGKSDNVPSIEVVRDMKDRVWRRQLANGAISRQKFDHLTKAERGGLADSDKARFLRRQLVETRQITKHVAQLLDSRFNSKSNQNKKLARNVKIITLKSKIVSDFRKDFGLYKLREVNNYHHAHDAYLNAVVGTALLKKYPKLEAEFVYGDYKHFDLVKLISKSDPSLGKATAKVFFYSNIMNFFKEELSLADGTLMKRPVIETNTETGEVVWDKVKDFKTIRKVLSYPQVNIVKKTEIQSGAFSKESVLSKGNSDKLIERKKGWDPKKYGGFDSPNTAYSIFVVAKVAKRKAQKLKTVKEIVGITIMEQAEYEKDNIAFLEKKGYQDIQEKLLIKLPKYSLFELENGRRRLLASANEFQKGNELALSGKYMKFLYLASRYDKLSSKIESEQQKKLFVEQHLHYFDEILDIVVKHATCYIKAENNLKKIISLYKKKEAYSINEQALNMLNLFIFTSLGAPSTFVFFDETIDRKRYTTSSDVLNGILIQQSITGLYETRIDLSRFGGD

SEQ ID NO: 1283 - protein, 1052 aa, Streptococcus pyogenes
LSASMIKRYDEHHQDLTLLKALVRQQLPEKYKEIFFDQSKNGYAGYIDGGASQEEFYKFIKPILEKMDGTEELLAKLNREDLLRKQRTFDNGSIPHQIHLGELHAILRRQEDFYPFLKDNREKIEKILTFRIPYYVGPLARGNSRFAWMTRKSEETITPWNFEEVVDKGASAQSFIERMTNFDKNLPNEKVLPKHSLLYEYFTVYNELTKVKYVTEGMRKPAFLSGEQKKAIVDLLFKTNRKVTVKQLKEDYFKKIECFDSVEISGVEDRFNASLGTYHDLLKIIKDKDFLDNEENEDILEDIVLTLTLFEDREMIEERLKTYAHLFDDKVMKQLKRRRYTGWGRLSRKLINGIRDKQSGKTILDFLKSDGFANRNFMQLIHDDSLTFKEDLQKAQVSGQGDSLHEHIANLAGSPAIKKGILQTVKVVDELVKVMGRHKPENIVIEMARENQTTQKGQKNSRERMKRIEEGIKELGSDILKEYPVENTQLQNEKLYLYYLQNGRDMYVDQELDINRLSDYDVDHIVPQSFLKDDSIDNKVLTRSDKNRGKSDNVPSEEVVKKMKNYWKQLLNAKLITQRKFDNLTKAERGGLSELDKAGFIKRQLVETRQITKHVAQILDSRMNTKYDENDKLIREVRVITLKSKLVSDFRKDFQFYKVREINNYHHAHDAYLNAVVGTALIKKYPKLESEFVYGDYKVYDIRKMIAKSEQEIGKATAKYFFYSNIMNFFKTEITLANGEIRKRPLIETNGETGEIVWDKGRDFATVRKVLSMPQVNIVKKTEVQTGGFSKESILPKRNSDKLIARKKDWDPKKYGGFDSPTVAYSVLVVAKVEKGKSKKLKSVKELVGITIMERSSFEKDPVDFLEAKGYKEVRKDLIIKLPKYSLFELENGRKRMLASAGELQKGNELALPSKYVNFLYLASHYEKLKGSPEDNEQKQLFVEQHKHYLDEIIEQISEFSKRVILADANLDKVLSAYNKHRDKPIREQAENIIHLFTLTNLGAPAAFKCFDTTIGRNRYKSIKEVLDATLIHQSITGLYETRIDLSQLGGD

SEQ ID NO: 1284 - protein, 1368 aa, Streptococcus pyogenes; identical to SEQ ID NO: 37

SEQ ID NO: 1285 - protein, 1367 aa, Streptococcus pyogenes; identical to SEQ ID NO: 241

SEQ ID NO: 1286 - protein, 1368 aa, Streptococcus pyogenes [sequence omitted]

SEQ ID NO: 1287 - protein, 1370 aa, Streptococcus ratti
MKKPYSIGLDIGTNSVGWAVITDDYKVPAKKMKVLGNTDKNYIKKNLLGALLFDSGNTAEDRRLKRTARRRYTRRRNRLLYLQDIFSDEMNKVDESFFHRLEDSFLVSEDKRGDHHPIFGNVVDEVKYHEQFPTIYHLRKYLADTPEKADLRLVYLALAHMIKFRGHFLIDDPKLDVKNTDSQELFSQFLTAYDVTQEDSHLADVKINISDIITEKMNKSRKVEALLFHFPSQKKNSFFGNLVSLVFGLLPNFKTNFNLAEDAKLQLSKDSYDEDLENLLGQIGDEYTDVFVAARKLYDSILLSGILTVNDLSTKAILSASMVRRYEEHNKDLAKLKAFVKANFTHDVFKEVFSDASKNGYAGYIEGKTSQEDFYKYVKNLIGKVDGSADFIEKIDREDFLRKQRTFDNGSIPHQVHLAEMKAILRRQGEYYPFLKEHAEKIQQILTFRIPYYVGPLDRHGHSDFAWASFNSEEKVTPWNFEEIIDKNKSAQAFIERMTNQDLYLPNEKVLPKHSPLYEKYTVYNELTKIKYVTETGTAKFFDANLKQEIFDGLFKKERKVTKRKLLTFLEKNFDEFRIVDIQGLDKETETFNASYGIYQDLLKIIKDKAFMDDSENADILEDIVLTLTLFEDREMIKQRLAKYADLFDKKVIDNLARRRYTGWGRLSAKLLNGIRDKRSRKTIMDYLVDDGRSNRNLMQLITDDNLTFKDEIAKAQYSDNSDDLHQVVQDLAGSPAIKKGILQSVKIVDELVKVMGYEPEQIVVEMARENQTTAKGRRNSQQRYKRLEEAIKNLDRDLNYKILKEHPTDNQALQNDRLFLYYLQNGRDMYTGESLDINRLSDYDIDHIIPQAFIKDNSIDNRVLVSSAKNRGKSDDVPSEDVVNRMRPFWNKLLNCGLISQRKYSNLTKKELTPNDKAGFIKRQLVETRQITKHVARILDEHFNKEFDEDKKRIRKVKVVTLKSNLVSNFRKEFELYKVREINDYHHAHDAYLNAVVAKALLMKYPKLEPEFVYGEYPKYNSYRERKTATQRMFFYSNIMNMFKSKVKLADERIIERPMIEVNDETGEIAWDKTKHIATVKKVLSYPQINIVKKVEEQTGGLTNETIYPRGSFDKLLNRKNTLEASKYGGFGSPTVAYCVLVVADSKNENGKVKKLKLGSELLGITILEKNDFENNSLDFLSRKGYQGVQEKKIIKLPKYSLFEFQDGSRRMLSSVMANDNKRGDLQKANEMILPAYLVKLLYHAKHINSVGEPAHKNYINEHCSEFQDLLNYIRQFADKFVDVDKNLSKIRSLSKSMAEYSVSEICSSFVNLLTLTALGAPADFKFFGTTIPRKRYGSPQSILSATLIHQSITGLYETRIDLSKLGED

SEQ ID NO: 1288 - protein, 1135 aa, Streptococcus salivarius
MSDLVLGLDIGIGSVGVGILNKVTGEIIHKNSRIFPAAQAENNLERRTNRQGRRLTRRKKHRRVRLNHLFEESGLITDFTKVSINLNPYQLRVKGLTAELSNEELFIALKNMVKHRGISYLDDASDDGNSSVGDYAQIVKENSKQLETKTPGQIQLERYQKYGQLRGDFTVEEDGRKHRLINVFPTSAYHAEALRILQTQQEFNPQITDEFINSYLEILTGKRKYYHGPGNEKSRTDYGKYTTKKDAQGQYITLNNIFGILIGKCTFYPEEYRAAKASYTAQEFNLLNDLNNLTVPTETKKLSEEQKYQIITYVKNEKAMGPAKLFKYIAKLLACDIADIKGYRIDKSDKAEIHTFEAYRKMKTLETIDIEQIEREKLDKLAYVLTLNTEREGIQEALDHEFADGTFSQEQVDELVQFRKANSSIFGKGWHSFSVKLMMELIPELYATSEEQMTILTRLGKQKTTSSSNKTKYIDEKQLTEEIYNPVVAKSVRQAIKIVNAAIKKYGDFDNIVIEMARETNEDDEKKAIQKIQKANKAEKDAAMRKAANQYNGKAELPHSVFHGHKQLATKIRLWHQQGERCLYTGKTISIHDLINNPNQFEIDHILPLSITFDDSLANKVLVYATANQEKGQRTPYQALDSMDDAWSFRELKAFVRESKALSNKKKEYLLTEEDISKFDVRKKFIERNLVDTRYASRVVLNALQEHFKAHKIDTKVSVVRGQFTSQLRRHWGIDKTRDTYHHHAVDALIIAASSQLNLWKKQKNTLVSYSEDQLLDIETGELISDDEYKESVFKAPYQHFVDTLKSKEFEDSILFSYQVDSKFNRKISDATIYATRQAKVGKDKKDETYVLGKIKDIYALGTKTPSKTGFYKFLDLYNKDKSQFLVYQKDRKTWDEVIEKIMEQYRPFKESDKNGKEVDFNPFEKYRIENGPIRKYSRKGNGPEIKSLKYYASKLGNHIDITPKDSNNKVVLQSVSPWRADVYFNKTTGSYEILGLKYADLQFEKGTGTYRISEEKYNDIKKKEGVDSDSEFKFTLYKNDLLLIKDTETKEQRLFRFLSRSMPNKKHYVELKPYSKDKFEKNESLIEILGSADKSGRCIKGLAKSNLSIFKVRTDVLGNQHIIKNEGDKPKLDF

SEQ ID NO: 1289 - protein, 1127 aa, Streptococcus salivarius
MSDLVLGLDIGIGSVGVGILNKVTGEIIHKNSRIFPAAQAENNVERRINRQGRRLTRRKKHRRVRLNHLFEESGLITDFTNVSINLNPYQLRVKGLTDELSNEELFIALKNMVKHRGISYLDDASDDGNSSVGDYAQIVKENSKQLETKTPGQIQLERYQKYGQLRGDFTVEEDGKKHRLINVFPTSAYRAEALRILQTQQEFNPQITDEFINSYLQILTGKRKYYHGPGNEKSRTDYGRYTTKKDSEDEYITLDNIFGILIGKCTFYPEEYRAAKASYTAQEFNLLNDLNNLTVPTETKKLSEEQKNQIITNVKNEKAMGPAKLFKYIAKLLSCDVADIKGYRIDKSDKAEIHTFEAYRKMKTLATIDIEQMERENLDKLAYVLTLNTEKEGIQEALEHEFADGTFSQEQIDELVQFRKANSSIFGKGWHSFSVKLMMELIPELYATSEEQMTILTRLGKQKTTSSSNKTKYIDEKQLTEEIYNPVAAKSVRQAIKIVNAAIKEYGDFDNIVIEMARETNEDDEKKAIQKIQKANKDEKDAAMLKAANQYNGKAELPHSVFHGHKQLATKIRLWHQQGERCLYTGKTISIHDLINNSNQFEIDHILPLSITFDDSLANKVLVYATANQEKGQRTPYQALDSMDDAWSFRELKAFVRDSKALSNKKKEYLLTEEDISKFDVRKKFIERNLVDTRYASRVVLNALQEHFRVHKTDTKVSVVRGQFTSQLRRHWGIEKTRDTYHHHAVDALIIAASSQLNLWKKQKNTLVSYSEDQLLDIETGELISDDEYKESVFKAPYQHFVDTLKSKEFEDSILFSYQVDSKFNRKISDATIYATRQAKVGKDKKDETYVLGKIKDIYSQTGYDAFIKIYKKDKSKFLMYRHDPQTFEKVIEPILENYPNKELNEKGKEVPCNPFLKYKEDHGYIRKYSKKGNGPEIKSLKYYDSKLGNHIDITPKNSNNKVVLQSVSPWRADVYFNKTTGKYEILGLKYADLKFEKGTGTYKISEEKYNDIKIKEGVDSDSEFKFTLYKNDLLLIKDTETKEQQLFRFLSRTMPNVKHYVELKPYDKQKFDDNEELIKILGIVAKGGQCKKGVSKPNISIYKIRTDVLGNQHIIKNEGDKPKLDF

SEQ ID NO: 1290 - protein, 1385 aa, Streptococcus salivarius
MTKPYSIGLDIGTNSVGWAVITDDYKVPSKKMKVLGNTSKKYIKKNLLGALLFDSGITAEGRRLKRTARRRYTRRRNRILYLQEIFSTEMATLDDAFFQRLDDSFLVPDDKRDSKYPIFGNLVEEKVYHDEFPTIYHLRKHLADSSKKADLRLVYLALAHMIKYRGHFLIEGDFNSKNNDLQKNFQDFLDTYNAIFESDLSLENSKQLEEIVKDKISKSAKKDRILKLFPGEKNSGIFSEFLKLIVGNQADFRKYFNLDEKTSLQFSKESYDEDLETLLGHIGDDYSDVFLKAKKLYDAILLSGILTVTDNGTEAPLSSAMIMRYKEHEEDLALLKAYIRNISLETYNEVFKDNTKNGYAGYIDGKTSQEDFYVYLKRLLAGLEGADYFLEKIDREDFLRKQRTFDNGSIPYQIYLQEMRAILDKQAKFYPFLAKNKERIEKILTFRIPYYVGPLARGNSDFAWSIRKRNEKITPWNFEDVIDKESSAEAFINRMTSFDLYLPEEKVLPKHSLLYENFTVYNELTKVRFIAEGMRDYQFLDSKQKKDIVRLYFKGKRKVTDKDIIEYLHAIDGYDGIELKGIEKQFNSSLSTYHDLLNIINDKEFLDDSSNETIIEEIIHTLTMFEDREMIKQRLSKFDNIFDKSVLKKLSRRHYTGWGKLSAKLINGIRDEKSGNTILDYLIDDGVSNRNFMQLIHDDALSFKKKIKKAQIIGDKDNIKQVVKSLPGSPAIKKGILQSIKIVDELVKVMGREPESIVVEMARENQYTNQGKSNSQQRLKRLEESLKGLGSKILKENVPTRLSKIDNNALQNDRLYLYYLQNGKDMYTGEELDIDRLSNYDIDHIIPQAFLKDDSIDNKVLVSSASNRGKSDDVPSLEVVKKRKTLWYQLLKSKLISQRKFDNLTKAERGGLSQEEKAGFIQRQLVETRQITKHVARLLDERFNNKKDENNRTLRTVKIITLKSSLVSQFRKDFELYKVREINDFHHAHDAYLNAVVASALLKKYPKLEPEFVYGDYPKYNSFRERKSATEKVYFYSNIMNIFKKSIPLADGTVIDRPLIEVNEETGESVWNKVADLNTVRKVLSYSQVNIVKKVEEQNHGLDRGKPKGLFNANLSSKPKPNSKENLVGAKEYLDPKKYGGYAGISNSFAILVKGTIEKGAKKKITNVLEFQGISILDRIYYRKDKLNFLLEKGYKDIELIIELPKYSLFELSDGSRRMLASILSTNNKRGEIHKGNQIFISQKFVKLLYHAKRISSTFNENHRKYVENHKKEFEELFYYILEFNENYVGAKKNGELLKSAFQSWQNHSIDELCSSFIGPTGSERKGLFELTSRGGAADFEFLGVKIPRYRDYTPSSLLKDATLIHQSVTGLYETRIDLGKLGED

SEQ ID NO: 1291 - protein, 1392 aa, Streptococcus sanguinis
MENKNYSIGLDIGTNSVGWAVITDDYKVPSKKMKVFGNTDKHFIKKNLIGALLFDEGATAEDRRLKRTARRRYTRRKNRLRYLQEIFSEEISKLDSSFFHRLDDSFLVPKDKRGSKYPIFATLEEEKEYHKKFPTIYHLRKHLADSKEKTDLRLIYLALAHMIKYRGHFLYEESFDIKNNDIQKIFNEFISIYDNTFEGSSLSGQNAQVEAIFTDKISKSAKRERVLKLFSDEKSTSLFSEFLKLIVGNQADFKKHFDLEEKAPLQFSKDTYDEDLENLLGQIGDGFTDLFLVAKKLYDAILLSGILTVTDPSTKAPLSASMIERYESHQKDLAALKQFIKNNLPKRYNEVFSDQSKDGYAGYIDGKTTQEAFYKYIKNLLSKFEGADYFLDKIEREDFLRKQRTFDNGSIPHQIHLQEMNAILRRQGEHYPFLKENREKIEKILTFRIPYYVGPLARGNRDFAWLTRNSDQAIRPWNFEEIVDKASSAEEFINKMTNYDLYLPEEKVLPKHSLLYETFAVYNELTKVKFIAEGLRDYQFLDSGQKKQIVNQLFKEKRKVTEKDIIHYLHNVDGYDGIELKGIEKQFNASLSTYHDLLKIIKDKEFMDDPKNEEILENIVHTLTIFEDREMIKQRLAQYDSIFDEKVIKALTRRHYTGWGKLSAKLINGICDKQTGDTILDYLIDDGKINRNFMQLINDDGLSFKEIIQKAQVVGKTDDVKQVVQELPGSPAIKKGILQSIKIVDELVKVMGYAPESIVIEMARENQTTARGKKNSQQRYKRIEDSLKNLAPGLDSNILKENPTDNIQLQNDRLFLYYLQNGKDMYTGKPLDIDQLSSYDIDHIIPQAFIKDDSIDNRVLTSSKDNRGKSDNVPSLEVVQKRKAFWQQLLDSKLISERKFNNLTKAERGGLDERDKVGFIRRQLVETRQITKHVAQILDASFNTEVNEKNQKIRTVKIITLKSNLVSNFRKEFELYKVREINDYHHAHDAYLNAVVAKAILKKYPKLEPEFVYGDYQKYDLKRYISRFKPSKEIEKATEKYFFYSNLLNFFKEEVHYADGIIVKRENIEYSKDTGEIAWNKEKDFATIKKVLSYPQVNIVKKTEIQTHGLDRGKPKGLFNSNPSPKPSEDSKENLVPIKQGLDPRKYGGYAGISNSYAVLVKAIVEKGAKKQQKTILEFQGISILDKINFENNKENYLLKKRYIEILSTITLPKYSLFEFPDGTRRRLASILSTNNKRGEIHKGNELVLPGKYTTLLYHAKNINKKLEPEHLEYVEKHRNDFAKLLECVLNFNDKYVGALKNGERIRQAFTDWETVDIEKLCFSFIGPENSKNAGLFELTSQGSASDFEFLGVKIPRYRDYAPSSLLKATLIHQSITGLYETRIDLSKLGED

SEQ ID NO: 1292 - protein, 1377 aa, Streptococcus sanguinis
MKKPYSIGLDIGTNSVGWAVITDDYKVPSKKMKVLGNTDKHFIKKNLIGALLFDEGTTAEDRRLKRTSRRRYTRRKNRLRYLQEIFSEEISKLDSSFFHRLDDSFLVPEDKRGSKYPIFATLEEEKEYHKKFPTIYHLRKHLADSKEKTDLRLIYLALAHMIKYRGHFLYEESFDIKNNDIQKIFNEFISIYDNTFEGSSLSGQNAQVEAIFTDKISKSTKRERVLKLFSDEKSTGLFSEFLKLIVGNQADFKKHFDLEEKAPLQFSKDTYDEDLENLLGQIGDGFADLFLVAKKLYDAILLSGILTVTDPSTKAPLSASMIERYENHQEDLAALKQFIKNNLSEKYAEVFSDQSKDGYAGFIDGKTTQEAFYKYIKNLLSKLEGADYFLNKIEREDFLRKQRTFDNGSIPHQIHLQEMNAILRRQGEHYLFLKENREKIEKILAFRIPYYVGPLARGNRDFAWLTRNSDQAIRPWNFEEVVDKASSAEDFINKMTNYDLYLPEEKVLPKHSLLYETFAVYNELTKVKFIAEGLRDYQFLDSGQKKQIVNQLFKDKRKVTEKDIIHYLHNVDGYDGIELKGIEKQFNASLSTYHDLLKIIKDKEFMDNPKNGEILENIIHTLTIFEDREMIKQRLAQYDTLFDEKVIKALTRRHYTGWGKLSAKLINGIRDKQTGKTILEYLIDDGDCNRNFMQLINDDGLSFKEIIQKAQVVGKTDDVKQVVQEIPGSPAIKKGILQSIKIVDELVKVMGHNPESIVIEMARENQTTAKGKKNSQQRYKRIEDALKNLAPGLDSNILKENPTDNIQLQNDRLFLYYLQNGKDMYTGKAIDINQLSNYDIDHIIPQAFIKDDSLDNRVLTSSKDNRGKSDNVPSIEVVQKRKAFWQQLLDSKLISERKFNNLTKAKRGGLDERDKVGFIKRQLVETRQITKHVAQLLDTRFNTEVNEENQKIRTVKIITLKSNLVSNFRKEFGLYKVREINDYHHAHDAYLNAVVAKAILKKYPKLEPEFVYGDYQKYDLKRYILKSKASNTIDKATEKYFFYSNLLNFFKEKVRYADGTIKKRENIEYSNDTGEIAWNKEKDFATIKKVLSLPQVNIVKKTEEQTVGQNGGLFDNNIVSKKKVVDASKLIPIKSSLSPEKYGGYARPTIAYSVLVIADIEKGKGKAKKLKRIKEIVGITIQDKKKFESNPVTYLEECGYKNINSNLIIKLPKYSLFEFNDGQRRLLASSIELQKGNELILPYHLTALLYHAQRINKISEPIHKQYVEAHQNEFKELLTTIISLSKKYIQKPNVELLLQQAFDQADKDIYQLSESFISLLKLTSFGAPGAFKFLGVEISQSSVRYKPNSQFLDTTLIHQSITGLYETRIDLSKLGED

SEQ ID NO: 1293 - protein, 1370 aa, Streptococcus sanguinis
MKKPYSIGLDIGTNSVGWAVVTDDYKVPAKKMRVFGDTDRSHIKKNLLGTLLFDDGNTAESRRLKRTARRRYTRRRNRILYLQEIFTESMNEIDESFFHRLDDSFLVPEDKRGSKYPIFATLQEEKEYHKQFPTIYHLRKQLADSKEKSDVRLIYLALAHMIKYRGHFLYEETFDIKNNDIQKIFNEFINIYDNTFEGSSLSGQNAQVEAIFTDKISKSAKRERVLKLFPDEKSTGLFSEFLKLIVGNQADFKKHFDLEEKAPLQFSKDTYDEELENLLGQIGDDFADLFLIAKKLYDAILLSGILTVTDPSTKAPLSASMIERYENHQKDLAALKQFIKNNLPEKYVEVFSDQSKDGYAGYIDGKTTQEAFYKYIKNLLSKFEGADYFLDKIEREDFLRKQRTFDNGSIPHQIHLQEMNAILRRQGEHYPFLKENREKIEKILTFRIPYYVGPLARDNRDFSWLTRNSDEPIRPWNFEEVVDKARSAEDFIHRMTNYDLYLPEEKVLPKHSLLYETFAVYNELTKVKFIAEGLRDYQFLDSGQKKQIVNQLFKEKRKVTEKDIIHYLHNVDGYDGIELKGIEKQFNANLSTYHDLLKITKDKEFMDDPKNEEILENIVHTLTIFEDREMIKQRLAQYDTLFDEKVIKALTRRHYTGWGKLSAKLINGIRDKQSGKTILDYLIDDDKINRNFMQLINDDGLSFKEIIQKAQVVGKTDDVKQVVQELPGSPAIKKGILQSIKIVDELVKVMGYALESIVIEMARENQTTARGKKNSQQRYKRIEDALKNLAPGLDSNILKENPTDNIQLKNDRLFLYYLQNGKDMYTGKPLDINQLSSYDIDHIIPQAFIKDDSIDNRVLTSSKDNRGKSDNVPSLEVVQKRKAFWQQLLDSKLISERKFNNLTKAERGGLDERDKVGFIRRQLVETQQITKNVAQILDARFNTEVKEKNQKIRTVKIITLKSNLVSNFRKEFGLYKVREINNYHHAHDAYLNAVVAKAILKKYPKLEPEFVYGDYQKYDLKKYISRFKPSKEIEKATEKYFFYSNLLNFFKEEVLYADGTIRKRENIEYSKDTGEIAWDKEKDFATIKKVLSYPQVNIVKKREVQTGGFSKESILPKGNSDKLIPRKTKDILWDTTKYGGFDSPVIAYSILLIADIEKGKAKKLKTVKTLVGITIMEKAAFEENPITFLENKGYHNVRKENILCLPKYSLFELENGRRRLLASAKELQKGNEIVLPVCLTTLLYHSKNLHKLDEPEHLEYIQKHRNEFKDLLNLVSEFSQKYILAEANLEKIKDLYADNEQADIEILANSFINLLTFTALGAPAAFKFFGKDVDRKRYTTVSEILNATLIHQSITGLYETRIDLSKLGEE

SEQ ID NO: 1294 - protein, 1421 aa, Streptococcus sanguinis
MTKFNKNYSIGLDIGVSSVGYAVVTEDYRVPAFKFKVLGNTEKEKIKKNLIGSTTFVSAQPAKGTRVFRVNRRRIDRRNHRITYLRDIFQKEIEKVDKNFYRRLDESFRVLGDKSEDLQIKQPFFGDKELETAYHKKYPTIYHLRKHLADADKNSPVADIREVYMAISHILKYRGHFLTLDKINPNNINMQNSWIDFIESCQEVFDLEISDESKNIADIFKSSENRQEKVKKILPYFQQELLKKDKSIFKQLLQLLFGLKTKFKDCFELEEEPDLNFSKENYDENLENFLGSLEEDFSDVFAKLKVLRDTILLSGMLTYTGATHARFSATMVERYEEHRKDLQRFKFFIKQNLSEQDYLDIFGRKTQNGFDVDKETKGYVGYITNKMVLTNPQKQKTIQQNFYDYISGKITGIEGAEYFLNKISDGTFLRKLRTSDNGAIPNQIHAYELEKIIERQGKDYPFLLENKDKLLSILTFKIPYYVGPLAKGSNSRFAWIKRATSSDILDDNDEDTRNGKIRPWNYQKLINMDETRDAFITNLIGNDIILLNEKVLPKRSLIYEEVMLQNELTRVKYKDKYGKAHFFDSELRQNIINGLFKNNSKRVNAKSLIKYLSDNHKDLNAIEIVSGVEKGKSFNSTLKTYNDLKTIFSEELLDSEIYQKELEEIIKVITVFDDKKSIKNYLTKFFGHLEILDEEKINQLSKLRYSGWGRYSAKLLLDIRDEDTGFNLLQFLRNDEENRNLTKLISDNTLSFEPKIKDIQSKSTIEDDIFDEIKKLAGSPAIKRGILNSIKIVDELVQIIGYPPHNIVIEMARENMTTEEGQKKAKTRKTKLESALKNIENSLLENGKVPHSDEQLQSEKLYLYYLQNGKDMYTLDKTGSPAPLYLDQLDQYEVDHIIPYSFLPIDSIDNKVLTHRENNQQKLNNIPDKETVANMKPFWEKLYNAKLISQTKYQRLTTSERTPDGVLTESMKAGFIERQLVETRQIIKHVARILDNRFSDTKIITLKSQLITNFRNTFHIAKIRELNDYHHAHDAYLAVVVGQTLLKVYPKLAPELIYGHHAHFNRHEENKATLRKHLYSNIMRFFNNPDSKVSKDIWDCNRDLPIIKDVIYNSQINFVKRTMIKKGAFYNQNPVGKFNKQLAANNRYPLKTKALCLDTSIYGGYGPMNSALSIIIIAERFNEKKGKIETVKEFHDIFIIDYEKFNNNPFQFLNDTSENGFLKKNNINRVLGFYRIPKYSLMQKIDGTRMLFESKSNLHKATQFKLTKTQNELFFHMKRLLTKSNLMDLKSKSAIKESQNFILKHKEEFDNISNQLSAFSQKMLGNTTSLKNLIKGYNERKIKEIDIRDETIKYFYDNFIKMFSFVKSGAPKDINDFFDNKCTVARMRPKPDKKLLNATLIHQSITGLYETRIDLSKLGED

SEQ ID NO: 1295 - protein, 317 aa, Streptococcus sp.
FEDSILFSYQVDSKFNRKISDATIYATRKAKLDKEKSEETYVLGKIKDIYSQAGYDAFIKIYNKDKSKFLMYHKDPQTFEKVIEEILRTYPSKELNDKNKEIPCNPFEKYRQENGPIRKYSKKSNGPEIKSLKYYDNKLGNHIDITPESSDNQVVLQSLKPWRTDVYFNHQTKKYELMGLKYSDLSFEKGSGKYSISNQKYNSIKRIEGIDEQSEFKFTLYKNDLILIKDSENNEQKLFRFNSRNDTAKHYIELKPYDKAKFDGEQELITILGNVAKGGRCLKGLNKSNISIFKVKTDVLGKKHIIKKEGDEPKLKF

SEQ ID NO: 1296 - protein, 1420 aa, Streptococcus sp.
MAKFNKNYSIGLDIGVSSVGYAVVTEDYRVPAFKFKVLGNTEKEKIKKNLIGSTTFVPAQSAQGTRVFRVNRRRIDRRNHRIAYLRDIFQKEIEKIDKNFYRRLDESFRVLGDKSEDIQIKQPFFGNKELETAYHKKYPTIYHLRKHLADADKNSPVADIREVYMVLSHILKYRGHFLTLGKIDPNNINMQNSWIDFIESCQDAFDLEISDESKTIAAIFKSSENRQEKVKQILSYFQQELLKKDKSIFKQLLQLLFGLKTKFKDCFELEEEPDLNFSKENYDENLENLLGALEEDFSDVFAKLKILRDTILLSSMLTYTGATHARFSATMVERYEEHRKDLQRFKSFVKQNLSEQDYLDIFGRKTPTGFDVDKETKGYVGYISNKMVLTNPQKQKTIQQNFYDYISGKITGIEGAECFLNKISDGTFLRKLRTTDNGAIPNQIHAYELEKIIERQGRDYPFLLENKDKLLSILTFKIPYYVGPLAKGNNSRFAWIKRTTSQDVLDDNDEDTRNGKIRPWNYHKLINMDETRDAFIINLIGNDIILLNEKVLPKRSLIYEEVMLQNELTRVKYKDKYGKIHFFNSELRQEIINNLFKTNSKRVSSAMLLSYLENFTNLQAVEIVSGIEKGKSLNSTLKTYNDLKTIFSEELLDSEIYQKELEEIIKVITVFDDKKSIKNYLTKYFGHLEFLNEEKINQLSKLRYTGWGRYSGKLLLGIRDEDTGFNLMQFLRNDDENRNLTQLISDTTLSFDSAIKAIQSKSTVEDDVFEEIKNLAGSPAIKRGILNSIKIVDELVQIIGYPPQNIIIEMARENMTTEEGQKKAKTRKSKLESALKNIEDSVLESGKVPHSDEQLQSEKLYLYYLQNGKDMYSLDKTGSPTPLYRDQLDQYEVDHIIPYSFLPIDSIDNKVLTHRENNQRKLNNIPDKETVANMKPFWEKLYNAKLISQTKYQRLTTSERTPDGVLTESMKAGFIERQLVETRQIIKHVARILDNRFSDTKIITLKSQLVTNFRNTFHIAKIRELNDYHHAHDAYLAVVVGQTLLKAYPKLAPELIYGHHAHFNRHEENKATLRKHLYSNIMRFFNNPDSKVSKDIWDCNRDLPIVKDVIYNSQINFVKRTMIKKGAFYNQNPVGKLNKQIAANNRYPLKTKVSSLDTSIYGGYGPMNSALSIIIIAERFNEKKGKIETVKEFHDIFIIDYEKFNNNPFQFLNNVSEEGFLKKNDLNRVLAFYRISKYSLMQKIDGTRMLFESKSNLHKVTQFKLTKTQNELFFHMKRLLTKSNLMDLKSESAIKESQNFIQTHQNEFDNIADRLSNYSQKMLGETKSLQTLINGYNERPIKQIDNNEETIRYYYDNFIKMFSFVKSGAPKDIINFFNDKYTVPRMRPKPDRKMLDATLIHQSITGLYETRIDLSKLGED

SEQ ID NO: 1297 - protein, 1371 aa, Streptococcus sp.
MENKNYSIGLDIGTNSVGWSVITDDYKVPSKKMKVLGNTDKHFIKKNLIGALLFDEGTTAEARRLKRTARRRYTRRKNRLRYLQEIFSEEIGKVDSSFFHRLDDSFLIPEDKRGSKYPIFATLAEEKKYHKQFPTIYHLRKQLADSKEKTDLRLIYLALAHMIKYRGHFLYEEAFDIKNNDIQKIFNEFISIYNNTFEGNSLSGQNVQVEAIFTDKISKSAKRERVLKLFPDEKSTGLFSEFLKLIVGNQADFKKHFDLEEKAPLQFSRDTYDEDLENLLGQIGDDFADLFLVAKKLYDAILLSGILTVTNPSTKAPLSASMIERYENHQKDLASLKQFIKNNLPEKYDEVFSDQSEDGYAGYIDGKTTQETFYKYIKNLLSKFEGADYFLDKIEREDFLRKQRTFDNGSIPHQIHLQEMNAILRRQGEHYPFLKENKEKIEKILTFRIPYYVGPLARGNRDFAWLTRNSDQAIRPWNFEEIVDKASSAEDFINKMTNYDLYLPEEKVLPKHSLLYETFAVYNELTKVKFIAEGLRDYQFLDSGQKKQIVTQLFKEKRKVTEKDIIQFLHNVDGYDGIELKGIEKQFNASLSTYHDLLKIIKDKAFMDDAKNEAILENIVHTLTIFEDREMIKQRLAQYDSLFDEKVIKALTRRHYTGWGKLSAKLINGISDKQTGNTILDYLIDDGEINRNFMQLINDDGLSFKEIIQKAQVVGKTNDVKQVVQELPGSPAIKKGILQSIKIVDELVKVMGHAPESIVIEMARENQTTARGKKNSQQRYKRIEDSLKILASGLNSKILKEHPTDNIQLQNDRLFLYYLQNGKDMYTGEALDINQLSSCDIDHIIPQAFIKDDSLDNRVLTSSKDNRGKSDNVPSLEVVDKMKVFWQQLLDSKLISYRKFNNLTKAERGGLNELDKVGFIKRQLVETRQITKHVAQILDARFNKEVTEKDKKNRTVKIITLKSNLVSNFRKEFELYKVREINDYHHAHDAYLNAVVAKAILKKYPKLEPEFVYGDYQKYDLKRYISRSKDPKEIEKATEKYFFYSNLLNFFKEEVHYADGTIVKRENIEYSKDTGEIAWNKEKDFATIKKVLSLPQVNIVKKREVQTGGFSKESILPKGNSDKLIPRKTKDILWDTTKYGGFDSPVIAYSILLIADIEKGKAKKLKTVKTLVGITIMEKDAFEKNPIAFLENKGYHNVCKENILCLPKYSLFELENGRRRLLASAKELQKCNEIVLPVYLTTLLYHSKNVHKLDEPGHLEYIQKHRNEFKDLLNLVSEFSQKYVLADANLEKIKNLYADNEQADIEILANSFINLLTFTALGAPAAFKFFGKDVDRKRYTTVSEILNATLIHQSITGLYETRIDLSKLGED

SEQ ID NO: 1298 - protein, 93 aa, Streptococcus sp.
MILIKDSENNEQKLFRFNSRNDTAKHYVELKPYDKARFDGQQELITILGNVAKGGQCLKGLNKSNISIFKVKTDVLGKKHIIKKEGDEPKLKF

SEQ ID NO: 1299 - protein, 1121 aa, Streptococcus sp.
MNGLVLGLDIGIASVGVGILEKNSGKIIHANSRLFPAATADNNVERRKNRQARRLHRRKKHRGVRFQDLFEDYGLLTDFSKVSINLNPYRLRVDGLNQQLTNEELFIALKNIVKRRGISYLDDASEDGGTVSSDYGKAVEENRKLLAEQTPGQIQLERFEKYGQVRGDFTVVENGEKRRLINVFSTSAYRKEAERILRKQQEFNSKITDEFIEDCLKILTGKRKYYHGPGNEKSRTDYGRFRTDGTTLDNIFGILIGKCTFYPDEYRASKASYTAQEFNLLNDLNNLTVPTETKKLSEEQKKVIVEYAKEAKTLGASTLLKYIAKMIDASVDQIRGYRVDVNNKPEIHTFEAYRKMQSLETISVGELSRNVLDELAHILTLNTEREGIEEAINTKLKDSFSQDQVLELVQFRKNNSSLFSKGWHNFSLKLMMELIPELYETSEEQMTILTRLGKQKSKEISKRTKYIDEKELTEEIYNPVVAKSVRQAIKIINEATKKHGIFDNIVIEMARENNEEDAKKDYIKRQKANQDEKNAAMEKAAFQYNGKKELPDSIFHGQKELATKIRLWHQQGEKCLYTGKNIPISDLIHNQYKYEIDHILPLSLSFDDSLSNKVLVLATANQEKGQRTPFQALDSMDDAWSYREFKSYVKESKLLGNKKKEYLLTEEDISKIEVKQKFIERNLIDTRYSSRVVLNALQDFYKAHKFDTTISVVRGQFTSQLRRKWGLEKSRETYHHHAVDALIIAASSQLRLWKKQNNPLIAYKEGQFVDSETGEIISLSDDEYKELVFKAPYDHFVDTLSSKTFEDSILFSYQVDSKFNRKISDATIYATRKAKLDKEKSEETYVLGKIKDIYSQAGYDAFIKIYNKDKSKFLMYHKDPQTFEKVIEEILRTYPSKELNDKNKEIPCNPFEKYRQENGPIRKYSKKSNGPEIKSLKYYDNKLGNHIDITPESSDNQVVLQSLKPWRTDVYFNHQTKKYELMGLKYSDLSFEKGSGKYSISNQKYNSIKRIEGIDEQSEFKFTLYKNDLILIKDSENNEQKLFRFNSRNDTAKHYIELKPYDKAKFDGEQELITILGNVAKGGRCLKGLNKSNISIFKVKTDVLGKKHIIKKEGDEPKLKF

SEQ ID NO: 1300 - protein, 1026 aa, Streptococcus sp.
MNGLVLGLDIGIASVGVGILEKNSGKIIHANSRLFPAATADNNVERRKNRQARRLNRRKKHRGVRFQDLFEDYGLLTDFSKVSINLNPYRLRVDGLNQQLTNEELFIALKNIVKRRGISYLDDASEDGGAVSSDYGKAVEENRKLLAEQTPGQIQLERFEKYGQVRGDFTVVENGEKRRLINVFSTSAYRKEAEKILRKQQEFNNQITDEFIEDYLKILTGKRKYYHGPGNEKSRTDYGRFRTDGTTLDNIFGVLIGKCTFYPNEYRASKSSYTAQEFNLLNDLNNLTVPTETKKLSEEQKKVIVEYAKEAKTLGASTLLKYIVKMIDASVDQISGYRVDVNNKPEMHTFEVYRKMQSLETISVGELSRNVLDELAHILTLNTEREGIEEAINSKLMGVFSQDQVLELVQFRKNNSSLFSKGWHNFSLKLMMELIPELYETSEEQMTILTRLGKQKSKETSKRTKYIDEKELTEEIYNPVVAKSVRQAIKIINEATKKHGIFDNIVIEMARENNEEDAKKDYIKRQKANQDEKNAAMEKAAFQYNGKKELPGNIFNGHKELATKIRLWHQQGEKCLYTGKTIPISDLIHNQYKYEIDHILPLSLSFDDSLSNKVLVHATANQEKGQRTPFQALDSMDDAWSYREFKSYVKDLKSLSNKKKDYLLTEEDISKIEVKQKFIERNLVDTRYSSRVVLNALQDFYKSHQFDTTISVVRGQFTSQLRRKWGLEKSRETYHHHAVDALIIAASSQLRLWKKQNNPLITYKEGQFIDSQTGEIISLTDDEYKELVFKAPYDHFVDTLHSKTFEDGILFSYQVDSKYNRKISDATIYATRKAKLDKDKSEETYVLGKIKDIYSQAGYDAFIKIYNKDKRKFLMYHKDPQTFEKVIEEILRTYPSKERNDKNKEVPCNPFEKYRQENGPIRKYSKKGNGPEIKCLKYYDNKLGNYIDISPDGSDNQVVLQSLKPWRTDVYFNHQTKKYELMGLKYSDLSFEKGSGKYSISNEKYNSIKRIEGVNEQSEFKFTLYK

SEQ ID NO: 1301 - protein, 1377 aa, Streptococcus sp.
MNNKPYSIGLDIGTNSVGWSVITDDYKVPSKKMKVLGNTDKRFIKKNLIGALLFDEGTTAEARRLKRTARRRYTRRKNRLRYLQEIFAEEMSKVDSSFFHRLDDSFLIPEDKRGSKYPIFATLVEEKEYHKQFPTIYHLRKQLADSKEKADLRLIYLVLAHMIKYRGHFLYEEAFDIKNNDIQKIFNEFISIYDNTFEGSSLSGQNAQVETIFTDKISKSAKRERVLKLFPDEKSTGLFSEFLKLIVGNQADFKKHFDLEEKAPLQFSKDTYDEDLENLLEQIGDDFADLFVAAKKLYDAILLSGILTVTDPSTKAPLSASMIERYENHQKDLAVLKQFIKTNLPEKYVEVFSDQSKDGYAGYIDGKTTQEAFYKYIKNLLSKFDGADYFLDKIEREVFLRKQRTFDNGSIPHQIHLQEMNTILRRQGEHYPFLKENKEKIEKILTFRIPYHVGPLARGNRDFAWLTRNSDQAIRPWNFEEIVDKASSAEDFINKMTNYDLYLPEEKVLPKHSLLYETFAVYNELTKVKFIAEGMRDYQFLDSGQKKKIINQLFKKKRKVTEDDIIDCLQKIDNYDGIELKGIEKQFNASLSTYHDILKIIRDKEFMDDPKNGDILENVIHTLTIFEDREMIKQRLAQYNSIFDEKVIKALSRKHYTGWGKLSAKLIDGIRDKQTGKTILDYLMDDGKSNRNFMQLIKDDELSFTEIIQKAQVVGDTDNLRQVVQNLPGSPAIKKGILQSIKIVDELVKVMGHAPESIVIEMARENQTTARGKKNSQQRYKRIEDSLKNLASGLDSNILKENPTDNIQLQNDRLFLYYLQNGKDMYTGEALNINQLSSYDIDHIIPQAFIKDDSLDNRVLTSSKDNRGKSDNVPSLEVVEKMKAFWQQLLDSKLISERKYNNLTKAERERGGLNELDKVGFIKRQLVETRQITKHVAQILDARFNKEVTEKNKKNRNVKIITLKSNMVSNFRKEFGLYKVREINDYHHAHDAYLNAVVAKAILKKYPKLEPEFVYGDYQKYDLKRYISRSKDPKEVEKATEKYFFYSNLLNFFKEEVHYADGTIVKRENIEYSKDTGEIAWNKEKDFATIKKVLSLPQVNIVKKTEEQTVGQNGGLFDNNIVSKKKVVDASKLIPIKSGLSPEKYGGYARPTIAYSVLVTYKQNNKIKNTMVGIPVLTKLEFERDPNLYLRNLGINNVSHVIKLVKYTVLEFKHKYGTYRRFIVSNQELKRANQIFVTTKQMKLISQYTTLDKNEHDSLLKNNQQLIQSIWNQFLEFMLATDLVNKKQYDELILTNNQTIEECRNIMNRVITTLSFTNINAGQKKIIFDDTLSLPIKRWQFTDSDKMVKKIIESTLIHQSITGLYETRIDLSKLGED

SEQ ID NO: 1302 - protein, 1371 aa, Streptococcus sp.
MNNNNYSIGLDIGTNSVGWAVITDDYKVPSKKMRVLGNTDKRFIKKNLIGALLFDEGTTAEDRRLKRTARRRYTRRKNRLRYLQEIFAEEMSKVDSSFFHRLDDSFLVPEDKSGSKYPIFATLAEEKEYHKKFPTIYHLRKHLADSKEKADLRLIYLALAHITKYRGHFLYEEAFDIKNNDIQKIFNEFINIYDNTFEGSSLSGQNAQVEAIFTGKISKSVKREHVLKLFPDEKSTGLFSEFLKLIVGNQADFKKHFDLEEKASLQFSKDTYDEDLENLLGQIGDDFADLFLVAKKLYDAILLSGILTVTDPSTKAPLSASMIERYENHQEDLAALKQFIKNNLPEKYAEVFSDQSKDGYAGYIDGKTTQEAFYKYIKNLLSKFEGADYFLDKIEREDFLRKQRTFDNGSIPHQIHLQEMNAILRRQGEHYPLLKENKEKIEKILTFRIPYYVGPLARGNRDFAWLTRNSDQAIRPWNFEEIVDKASSAESFINKMTNYDLYLPEEKVLPKHSLLYETFAVYNELTKVKFIAEGLRDYQFFDSGQKKQIVNQLFKEKRKVTEKDIIHYLHNVDGYDGIELKGIEKQFNASLSTYHDLLKIIKDKEFMDNHKNQEILENIVHTLTIFEDREMIKQRLAQYDSIFDEKVIKALTRRHYTGWGKLSAKLINGICDKKTGKTILDYLIDDGYNNRNFMQLINDDGLSFKEIIQKAQVVGKTDDLTQVVRELSGSPAIKKGILQSIKIVDELVKIMGYAPESIVIEMARENQTTAKGKKNSQQRYKRIEDALKNLAPGLDSTISKENPTDNIQLQNDRLFLYYLQNGKDMYTGEALDINQLSSYDIDHIIPQAFIKDDSLDNRVLTSSKDNRGKSDNVPSLEVVKKRKAFWQQLLDSKLISERKFNNLTKAERGGLDERDKVGFIKRQLVETRQITKHVARILDARFNTEVSEKNQKIRSVKIITLKSNLVSNFRKEFKLYKVREINDYHHAHDAYLNAVVAKAILKKYPKLEPEFVYGDYQKYDLKRYISKSKDPKEVEKATEKYFFYSNLLNFFKEEVHYADGTIVKRENIEYSKDTGEIAWNKEKDFVTIKKVLSYPQVNIVKKREVQTGGFSKESILPKGNSDKLIPRKTKDILWDTTKYGGFDSPVIAYSILLIADIEKGKAKKLKTVKTLVGITIMEKAAFEKNPITFLENKGYHNVRKENILCLPKYSLFELENGRRRLLASAKELQKGNEIVLPVYLTTLLYHSKNVHKLDEPEHLEYIQKHRYEFKDLLNLVSEFSQKYVLAEANLEKIKSLYVDNEQADIEILANSFINLLTFTALGAPAAFKFFGKDVDRKRYTTVSEILNATLIHQSITGLYETRIDLSKLGED

SEQ ID NO: 1303 - protein, 1139 aa, Streptococcus sp.
MSDLVLGLDIGIGSVGVGILNKVTGEIIHKNSRIFPAAQAENNLERRTNRQGRRLTRRKKHRRVRLNHLFEESGLITDFTKVSINLNPYQLRVKGLTAELSNEELFIALKNMVKHRGISYLDDASDDGNSSVGDYAQIVKENSKQLETKTPGQIQLERYQKYGQLRGDFTVEEDGRKHRLINVFPTSAYHAEALRILQTQQEFNPQITDEFINSYLEILTGKRKYYHGPGNEKSRTDYGKYTTKKDAQGQYITLNNIFGILIGKCTFYPEEYRAAKASYTAQEFNLLNDLNNLTVPTETKKLSEEQKYQIITYVKNEKAMGPAKLFKYIAKLLSCDVADIKGYRIDKSDKAEIHTFEAYRKMKTLETLDVKKMAREELDKLAYVLTLNTEREGIQEALDHEFADGTFSQEQVDELVQFRKANSSIFGKGWHSFSVKLMMELIPELYATSEEQMTILTRLGKQKTTSSSNKTKYIDEKQLTEEIYNPVVAKSVRQAIKIVNAAIKKYGDFDNIVIEMARETNEDDEKKAIQKIQKANKAEKDAAMRKAANQYNGKAELPHSVFHGHKQLATKIRLWHQQGERCLYTGKTISIHDLINNPNQFEIDHILPLSITFDDSLANKVLVYATANQEKGQRTPYQALDSMDDAWSFRELKAFVRESKALSNKKKEYLLTEEDISKFDVRKKFIERNLVDTRYASRVVLNALQEHFRTHKIDTKVSVVRGQFTSQLRRHWGIEKTRDTYHHHAVDALIIAASSQLNLWKKQKNTLVSYSEDQLLDIETGELISDDEYKESVFKAPYQHFVDTLKSKEFEDSILFSYQVDSKFNRKISDATIYATRKAKLDKEKKEYTYTLGKIKDIYALGTKTPSKTGFYKFLDLYKKDKSQFLMYQKDRRTWDEVIEKILEQYRPFKEKDKNGKEVDFNPFEKYRIENGPIRKYSRKGNGPEIKSLKYYDNLLGRFVDITPSESKNPVALLSLNPWRTDVYYNTETRKYEFLGLKYADLCFEKGGSYGISKVKYNKIREKEGIGKNSEFKFTLYKNDLILIKDTETNRQQIFRFWSRTGKDNPKSFEKHKLELKPYEKTRFEKGEELKVLGKVPPSSNRLQKNMQIENLSIYKVRTDVLGNQHIIKNEGDKPKLDF

SEQ ID NO: 1304 - protein, 1375 aa, Streptococcus sp.
MSNKSYSIGLDIGTNSVGWAVITDDYKVPSKKMKVLGNTDKHFIKKNLIGALLFDEGTTAEDRRLKRTARRRYTRRKNRLRYLQEIFSQEISKVDSSFFHRLDDFFLVPEDKRGSKYPIFATLVEEKEYHKKFPTIYHLRKHLADSKEKTDLRLIYLALAHMIKYRGHFLYEESFDIKNNDIQKIFSEFISIYDNTFEGKSLSGQNAQVEAIFTDKISKSTKRERVLKLFPDEKSTGLFSEFLKLIVGNQADFKKHFDLEEKAPLQFSKDTYDEDLENLLGQIGDDFADLFLVAKKLYDAILLSGILTVKDLSTKAPLSASMIERYENHQKDLAALKQFIQNNLQEKYDEVFSDQSKDGYAGYIDGKTTQEAFYKYIKNLLSKFEGADYFLDKIEREDFLKKQRTFDNGSIPHQIHLQEMNAIIRRQGEHYPFLQENKEKIEKILTFRIPYYVGPLARGNGDFAWLTRNSDQAIRPWNFEEIVDQASSAEDFINKMTNYDLYLPEEKVLPKHSLLYETFAVYNELTKVKFIAEGLTRYQFLDKKQKKDIFDTFFKAENKRKVTEKDIIHYLHNVDGYDGIELKGIEKQFNASLSTYHDLLKIIKDKAFMDDSKNEEILENIIHTLTIFEDREMIKQRLAQYDSLFDEKVIKALTRRHYTGWGKLSAKLINGIRDKKSGKTILDYLIDDGEINRNFMQLIHDDGLSFKEIIQKAQVFGKTNDVKQVVQELPGSPAIKKGILQSIKIVDELVKVMGHAPESIVIEMARENQTTARGKKNSQQRYKRIEDSLKNLASGLDSNILKENPTDNIQLQNDRLFLYYLQNGRDMYTGKPLEINQLSNYDIDHIIPQAFIKDDSLDNRVLTSSKDNRGKSDNVPSLEVVEKMKAFWQQLLDSKLISERKFNNLTKAERERGGLNELDKVGFIKRQLVETRQITKHVAQFLDARFNKEVTEKDKKNRNVKIITLKSNLVSNFRKEFGLYKVREINDYHHAHDAYLNAVLAKAILKKYPKLEPEFVYGDYQKYDLQRYISKSREPKEVEKATQKYFFYSNLLNFFKEEVHYADGTIVKRENIEYSKDTGEIAWNKEKDFATVKKVLSLPQVNIVKKTEVQTGGFSKESILPKGNSDKLIPRKTKEILWDTTKYGGFDSPVIAYSILLIADIEKGKAKKLKTVKTLVGITIMEKATFEKNPITFLENKGYHNVRKENILCLPKYSLFELESGRRRMLASAKELQKGNEIVLPVYLTTLLYHSKNVHKLDEPEHLEYIQKHRYEFKDLLNLVSEFSQKYVLADANLEKIKNLYADNEQADIEILANSFINLLTFTALGAPAAFKFLGKDVDRKRYTTVSEILNATLIHQSITGLYETRIDLSKLGED

SEQ ID NO: 1305 - protein, 206 aa, Streptococcus sp.
RTPFQALDSMDDAWSYREFKSYVKESKLLGNKKKEYLLTEEDISKIEVKQKFIERNLIDTRYSSRVVLNALQDFYKAHKFDTTISVVRGQFTSQLRRKWGLEKSRETYHHHAVDALIIAASSQLRLWKKQNNPLIAYKEGQFVDSETGEIISLSDDEYKELVFKAPYDHFVDTLSSKTFEDSILFSYQVDSKFNRKISDATIYATR

SEQ ID NO: 1306 - protein, 1122 aa, Streptococcus suis
MSNGKILGLDIGIASVGVGVIDAQTGEIIHASSRIFPSANAANNAERRTFRGSRRLIRRKKHRIKRLDDLFNDFHINLDGEMSTDNPYVLRVKGLSQKLTVEELYISIKNIMKRRGISYLDDAESDNEAGRSDYAKAIERNRQLLTSKTPGEIQLERLEKYGQLRGNFTIIDEEGQSQQIINVFSTSDYVKEVEKILDCQKMYHKFISDEFCDKLIELLREKRKYYVGPGNEKSRTDYGIYRTDGTTLENLFGILIGKCTFYPDQYRSSRASYTAQEFNFLNDLNNLTVPTETKKLSQEQKEFLVNYAKETSVLGAGKILQQIAKLADCKVEDIRGYRLDNKDKPELHTFETYRAMKGLVPLVDIGVLSREQLDILADILTLNTDFEGIREALKKQLPNVFDEKQVKGLASFRKSKSQLFAKGWHNLSQKIMLEVIPELYATSDEQMTILTRLGKFEKSSVAEYPSSINVDEITDEIYNPVVAKSIRQTIKIINASIKKWDEFDQIVIEMPRDRNEDEEKKRIADGQKANAKEKADSILRAAELYCAGKVLPDYVYNGHNQLATKIRLWYQQGERCIYTGQPISIHDLIHNQNQYEIDHILPLSLTFDDSLSNKVLVLATANQEKAQRTPYNYLKSATSAWSYREFKDYVTKRKGIGKKKCEYLTFEEDINGFEVRSKFIQRNLVDTRYASKVILNALQDYFKISGIQTKVSVVRGQFTSQLRHKWGIEKTRETYHHHAVDALIIAASSQLRLWKKQESPLVVDYQEGRQVDLETGEILELTDEQYKELVYQPPYQGFVNTISSSAFDNEILFSYQVDSKVNRKISDATIYATRNAQLGKDKTEGIYVLGKIKDIYTQAGYEAFLKRYTKDKTSFLMYHKDLDTWEKVIEIILRDYREYDEKGKEIGNPFERYRRENGYVKKYSRKGNGTAIKSLKYYDNKLGNHIDITPENSRNAVVLQSLKPWRTDVYFNKETGKYEFLGIKYSDLSFEKGTGEYGISQEKYDSIKIAEGVAKKSIFKFTLYKQDLLFIKDIENNFGKLLRFTSKNDTSKHYVELKPYDKNKFGTEEPLLPVLGNVAKSGQCIKGLNKSNISIYKVRTDILGYRHFIKQEGEHPQLKFKK

SEQ ID NO: 1307 - protein, 1381 aa, Streptococcus suis
MVKKKYAIGIDIGTNSVGWSIVTDDYKVPSKKMKVFGNTEKRYIKKNLLGTLLFDEGNTAENRRLKRTARRRYTRRRNRILYLQEIFAEEINKIDDSFFQRLDDSFLIVEDKQGSKHPIFGTLQEEKEYHKQFPTIYHLRKQLADSSQKADIRLIYLALAHIIKYRGHFLFEGDLKSENKDVQHLFNDFVEMFDKTVEGSYLSENLPNVADVLVEKVSKSRRLENILHYFPNEKKNGLFGNFLALALGLQPNFKTNFELAEDAKIQFSKETYEEDLEELLGKIGDDYADLFIATKSLYDGILLAGILSTTDSTTKAPLSSSMVNRYEEHQKDLALLKNFIHQNLSDSYKEVFNDKLKDGYAGYIEGKTTQENFYRFIKKAIEKIEGSNYFIDKIDREDFLRKQRTFDNGSIPHQIHLQEMHAIIRRQAEFYPFLVENQDKIEKILTFRIPYYVGPLARGKSEFAWLNRKSDEKIRPWNFDEMVDKETSAENFITRMTNYDRYLPDQKVLPKHSLLYEKFAVYNELTKVKFIAEGMRDYQFLDSGQKKDIVKTLFKTKRKVTAKDIKAYLENSNGYAGVELKGLEEQFNASLPTYHDLLKILRDKAFIDAEENQEILEDIVLTLTLFEDREMIRKRLEKYKDILTEEQRKKLERRHYTGWGRLSAKLINGILDKVTRKTILGYLIDDGTSNRNFMQLINDDTLSFVDEIRLAQGSGEAEDYRAEVQNLAGSPAIKKGILQSLKIVDELIEVMGYEPEHIVVEMARENQFTNQGRRNSQQRINRLENALKDFGSKILEEQKPYGVSKVNNIHLQSDRLFLYYLQNGKDMYTDEELDIDHLSEYDIDHIIPQAFIKDDSLDNKVLTKSAKNRGKSDDVPSMEIVHNRKNFWRQLLKSKLISQRKFDNLTKAERGGLTNEDKARFIQRQLVETRQITKHVARMLDTRFNTKLDEAGNRIRDPKVNIITLKSNLVSQFRKDYQLYKIREINNYHHAHDAYINAVVATALLKKYPQLAPEFVYGEYPTYNSYNSRKSATEKVLFYSNIMNFFKRIVVHSKTGEVRIRPVIEVNKETGEIVWDKKSDFRTVRKVLSYPQVNVVKKTEVQNHGLDRGKPKGFYNANLSPRPKEGSVENLVPAKQSFDTKRYGGYAGISNSYAVLVNGIIEKGKKKSKAEVTEFQGISILARKDFDKNPKQYLLNLGYKDIKSIIKLPKYSLFELENGSRRMLASILSTNNKRGEIHKGNEMYLPDKFVTLLYHAMRVNRTLEPGHKKYVETHRHVFDELLIYILEYNEKIVGAKANGKRIVEAYSARKDTDNLEELCNSFINLLNLTALGSAVDFEFLGTKIPRYRDYTPSSLLKATLIHQSVTGLYETRIDLSKLGGD

SEQ ID NO: 1308 - protein, 39 aa, Streptococcus thermophilus
GRCIKGLGKSNISIYKVRTDVLGNQHIIKNEGDKPKLDF

SEQ ID NO: 1309 - protein, 302 aa, Streptococcus thermophilus
MIRRKKHRIVRLNRLFEESGLITDFTKISINLNPYQLRVKGLTDELSNEELFIALKNMVKHRGISYLDDASDDGNSSVGDYAQIVKENSKQLETKTPGQIQLERYQTYGQLRGDFTVEKDGKKHRLINVFPTSAYRSEALRILQTQQEFNPQITDEFINRYLEILTGKRKYYHGPGNEKSRTDYGRYRTSGETLDNIFGILIGKCTFYPDEFRAAKASYTAQEFNLLNDLNNLTVPTETKKLSKEQKNQIINYVKNEKAMGPAKLFKYIAKLLSCDVADIKGYRIDKSGKAERFILSKPIEK

SEQ ID NO: 1310 - protein, 1121 aa, Streptococcus thermophilus
MSDLVLGLDIGIGSVGVGILNKVTGEIIHKNSRIFPAAQAENNLVRRTNRQGRRLTRRKKHRIVRLNRLFEESGLITDFTKISINLNPYQLRVKGLTDELSNEELFIALKNMVKHRGISYLDDASDDGNSSVGDYAQIVKENSKQLETKTPGQIQLERYQTYGQLRGDFTVEKDGKKHRLINVFPTSAYRSEALRILQTQQEFNPQITDEFINRYLEILTGKRKYYHGPGNEKSRTDYGRYRTSGETLDNIFGILIGKCTFYPDEFRAAKASYTAQEFNLLNDLNNLTVPTETKKLSKEQKNQIINYVKNEKAMGPAKLFKYIAKLLSCDVADIKGYRIDKSGKAEIHTFEAYRKMKTLETLDIEQMDRETLDKLAYVLTLNTEREGIQEALEHEFADGSFSQKQVDELVQFRKANSSIFGKGWHNFSVKLMMELIPELYETSEEQMTILTRLGKQKTTSSSNKTKYIDEKLLTEEIYNPVVAKSVRQAIKIVNAAIKEYGDFDNIVIEMARETNEDDEKKAIQKIQKANKDEKDAAMLKAANQYNGKAELPHSVFHGHKQLATKIRLWHQQGERCLYTGKTISIHDLINNSNQFEVDHILPLSITFDDSLANKVLVYATANQEKGQRTPYQALDSMDDAWSFRELKAFVRESKTLSNKKKEYLLTEEDISKFDVRKKFIERNLVDTRYASRVVLNALQEHFRAHKIDTKVSVVRGQFTSQLRRHWGIEKTRDTYHHHAVDALIIAASSQLNLWKKQKNTLVSYSEDQLLDIETGELISDDEYKESVFKAPYQHFVDTLKSKEFEDSILFSYQVDSKFNRKISDATIYATRQAKVGKDKADETYVLGKIKDIYTQDGYDAFMKIYKKDKSKFLMYRHDPQTFEKVIEPILENYPNKQMNEKGKEVPCNPFLKYKEEHGYIRKYSKKGNGPEIKSLKYYDSKLGNHIDITPKDSNNKVVLQSVSPWRADIYFNNTTGKYEILGLKYADLQFEKGTGTYKISQEKYNDIKKKEGVDSDSEFKFTLYKNDLLLVKETETKEQQLFRFLSRTMPKQKHYVELKPYDKQKFEGGEALIKVLGNVANGGQCIKGLGKSNISIYKVRTDVLGNQHIIKNEGDKPKLDF

SEQ ID NO: 1311 - protein, 1121 aa, Streptococcus thermophilus
MSDLVLGLDIGIGSVGVGILNKVTGEIIHKNSRIFPAAQAENNLVRRTNRQGRRLTRRKKHRIVRLNRLFEESGLITDFTKISINLNPYQLRVKGLTDELSNEELFIALKNMVKHRGISYLDDASDDGNSSVGDYAQIVKENSKQLETKTPGQIQLERYQTYGQLRGDFTVEKDGKKHRLINVFPTSAYRSEALRILQTQQEFNPQITDEFINRYLEILTGKRKYYHGPGNEKSRTDYGRYRTSGETLDNIFGILIGKCTFYPDEFRAAKASYTAQEFNLLNDLNNLTVPTETKKLSKEQKNQIINYVKNEKAMGPAKLFKYIAKLLSCDVADIKEYRIDKSGKAEIHTFEAYRKMKTLETLDIEQMDRETLDKLAYVLTLNTEREGIQEALEHEFADGSFSQKQVDELVQFRKANSSIFGKGWHNFSVKLMMELIPELYETSEEQMTILTRLGKQKTTSSSNKTKYIDEKLLTEEIYNPVVAKSVRQAIKIVNAAIKEYGDFDNIVIEMARETNEDDEKKAIQKIQKANKDEKDAAMLKAANQYNGKAELPHSVFHGHKQLATKIRLWHQQGERCLYTGKTISIHDLINNSNQFEVDHILPLSITFDDSLANKVLVYATANQEKGQRTPYQALDSMDDAWSFRELKAFVRESKTLSNKKKEYLLTEEDISKFDVRKKFIERNLVDTRYASRVVLNALQEHFRAHKIDTKVSVVRGQFTSQLRRHWGIEKTRDTYHHHAVDALIIAASIQLNLWKKQKNTLVSYSEDQLLDIETGELISDDEYKESVFKAPYQHFVDTLKSKEFEDSILFSYQVDSKFNRKISDATIYATRQAKVGKDKADETYVLGKIKDIYTQDGYDAFMKIYKKDKSKFLMYRHDPQTFEKVIEPILENYPNKQINEKGKEVPVNPFLKYKEEHGYIRKYSKKGNGPEIKSLKYYDSKLGNHIDITPKDSNNKVVLQSVSPWRADVYFNKTTGKYEILGLKYADLQFEKGTGTYKISQEKYNDIKKKEGVDSDSEFKFTLYKNDLLLVKDTETKEQQLFRFLSRTMPKQKHYVELKPYDKQKFEGGEALIKVLGNVANSGQCKKGLGKSNISIYKVRTDVLGNQHIIKNEGDKPKLDF

SEQ ID NO: 1312 - protein, 1121 aa, Streptococcus thermophilus
MSDLVLGLDIGIGSVGVGILNKVTGEIIHKNSRIFPAAQAENNLVRRTNRQGRRLTRRKKHRRVRLNRLFEESGLITDFTKISINLNPYQLRVKGLTDELSNEELFIALKNMVKHRGISYLDDASDDGNSSVGDYAQIVKENSKQLETKTPGQIQLERYQTYGQLRGDFTVEKDGKKHRLINVFPTSAYRSEALRILQTQQEFNPQITDEFVNRYLEILTGKRKYYHGPGNEKSRTDYGRYRTNGETLDNIFGILIGKCTFYPEEFRAAKASYTAQEFNLLNDLNNLTVPTETKKLSKEQKNQIINYVKNEKAMGPAKLFKYIAKLLSCDVADIKGYRIDKSGKAEIHTFEAYRKMKTLETLDIEQMDRETLDKLAYVLTLNTEREGIQEALEHEFADGSFSQKQVDELVQFRKANSSIFGKGWHNFSVKLMMELIPELYETSEEQMTILKRLGKQKTTSSSNKTKYIDEKLLTEEIYNPVVAKSIRQAIKIVNAAIKEYGDFDNIVIEMARETNEDDEKKAIQKIQKANKDEKDAAMLKAANQYNGKAELPHSVFHGHKQLATKIRLWHQQGERCLYTGKTISIHDLINNPNQFEVDHILPLSITFDDSLANKVLVYATANQEKGQRTPYQALDSMDDAWSFRELKAFVRESKTLSNKKKEYLLTEEDISKFDVRKKFIERNLVDTRYASRVVLNALQEHFRAHKIDTKVSVVRGQFTSQLRRHWGIEKTRDTYHHHAVDALIIAASSQLNLWKKQKNTLVSYSEDQLLDIETGELISDDEYKESVFKAPYQHFVDTLKSKEFEDSILFSYQVDSKFNRKISDATIYATRQAKVGKDKKDETYVLGKIKDIYTQDGYDAFMKIYKKDKSKFLMYRHDPQTFEKVIEPILENYPNKEMNEKGKEVPCNPFLKYKEEHGYIRKYSKKGNDPEIKSLKYYDSKLGNHIDITPKDSNNKVVLQSVSPWRADVYFNKTTGKYEILGLKYADLQFEKGTGTYKISQEKYNDIKKKEGVDSDSEFKFTLYKNDLLLVKDTETKEQQLFRFLSRTMPKQKHYVELKPYDKQKFEGGEALIKVLGNVANSGQCKKGLGKSNISIYKVRTDVLGNQHIIKNEGDKPKLDF

SEQ ID NO: 1313 - protein, 1122 aa, Streptococcus thermophilus
MSDLVLGLDIGIGSVGVGILNKVTGEIIHKNSRIFPAAQAENNVERRTNRQGRRLTRRKKHRRVRLNRLFEESGLITDFTKISINLNPYQLRVRGLTDELSNEELFIALKNMVKHRGISYLDDASDDGNSSVGDYAQIVKENSKQLETKTPGQIQLERYQTYGQLRGDFTVEKDGKKHRLINVFPTSAYRSEALRILQTQQEFNSQITDEFINRYLEILTGKRKYYHGPGNEKSRTDYGRYRTSGETLDNIFGILIGKCTFYPEEFRAAKASYTAQEFNLLNDLNNLTVPTETKKLSKEQKNQIINYVKNEKAMGPAKLFKYIAKLLSCDVADIKGYRIDKSGKAEIHTFEAYRKMKTLETLDIEQMDRETLDKLAYVLTLNTEREGIQEALEHEFADGSFSQKQVDELVQFRKASSSIFGKGWHNFSVKLMMELIPELYETSEEQMTILTRLGKQKTTSSSNKTKYIDEKLLTEEIYNPVVAKSVRQAIKIVNAAIKEYGDFDNIVIEMARETNEDDEKKAIQKIQKANKDEKDAAMLKAANQYNGKAELPHSVFHGHKQLATKIRLWHQQGERCLYTGKTISIHDLINNPNQFEVDHILPLSITFDDSLANKVLVYATANQEKGQRTPYQALDSMDDAWSFRELKAFVRESKTLSNKKKEYLLTEEDISKFDVRKKFIERNLVDTRYASRVVLNALQEHFRAHKIDTKVSVVRGQFTSQLRRHWGIEKTRDTYHHHAVDALIIAASSQLNLWKKQKNTLVSYSEDQLLDIETGELISDDEYKESVFKAPYQHFVDTLKSKEFEDSILFSYQVDSKFNRKLSDATIYATRQAKVGKDKKDETYVLGKIKDIYTQDGYDAFMKIYKKDKSKFLMYRHDPQTFEKVIEPILENYPNKEMNEKGKEVPCNPFLKYKEEHGYIRKYSKKGNGPEIKSLKYYDSKLLGNPIDITPENSKNKVVLQSLKPWRADVYFNKTTGKYEILGLKYADLQFEKKTGTYKISQEKYNGIMKEEGVDSDSEFKFTLYKNDLLLVKDTETKEQQLFRFLSRTMPNVKYYVELKPYSKDKFEKNESLIEILGSADKSGRCIKGLGKSNISIYKVRTDVLGNQHIIKNEGDKPKLDF

SEQ ID NO: 1314 - protein, 1388 aa, Streptococcus thermophilus
MTKPYSIGLDIGTNSVGWAVITDNYKVPSKKMKVLGNTSKKYIKKNLLGVLLFDSGITAEGRRLKRTARRRYTRRRNRILYLQEIFSTEMATLDDAFFQRLDDSFLVPDDKRDSKYPIFGNLVEEKAYHDEFPTIYHLRKYLADSTKKADLRLVYLALAHMIKYRGHFLIEGEFNSKNNDIQKNFQDFLDTYNAIFESDLSLENSKQLEEIVKDKISKLEKKDRILKLFPGEKNSGIFSEFLKLIVGNQADFRKCFNLDEKASLHFSKESYDEDLETLLGYIGDDYSDVFLKAKKLYDAILLSGFLTVTDNETEAPLSSAMIKRYNEHKEDLALLKEYIRNISLKTYNEVFKDDTKNGYAGYIDGKTNQEDFYVYLKNLLAEFEGADYFLEKIDREDFLRKQRTFDNGSIPYQIHLQEMRAILDKQAKFYPFLAKNKERIEKILTFRIPYYVGPLARGNSDFAWSIRKRNEKITPWNFEDVIDKESSAEAFINRMTSFDLYLPEEKVLPKHSLLYETFNVYNELTKVRFIAESMRDYQFLDSKQKKDIVRLYFKDKRKVTDKDIIEYLHAIYGYDGIELKGIEKQFNSSLSTYHDLLNIINDKEFLDDSSNEAIIEEIIHTLTIFEDREMIKQRLSKFENIFDKSVLKKLSRRHYTGWGKLSAKLINGIRDEKSGNTILDYLIDDGISNRNFMQLIHDDALSFKKKIQKAQIIGDEDKGNIKEVVKSLPGSPAIKKGILQSIKIVDELVKVMGGRKPESIVVEMARENQYTNQGKSNSQQRLKRLEKSLKELGSKILKENIPAKLSKIDNNALQNDRLYLYYLQNGKDMYTGDDLDIDRLSNYDIDHIIPQAFLKDNSIDNKVLVSSASNRGKSDDFPSLEVVKKRKTFWYQLLKSKLISQRKFDNLTKAERGGLLPEDKAGFIQRQLVETRQITKHVARLLDEKFNNKKDENNRAVRTVKIITLKSTLVSQFRKDFELYKVCEINDFHHAHDAYLNAVIASALLKKYPKLEPEFVYGDYPKYNSFRERKSATEKVYFYSNIMNIFKKSISLADGRVIERPLIEVNEETGESVWNKESDLATVRRVLSYPQVNVVKKVEEQNHGLDRGKPKGLFNANLSSKPKPNSNENLVGAKEYLDPKKYGGYAGISNSFAVLVKGTIEKGAKKKITNVLEFQGISILDRINYRKDKLNFLLEKGYKDIELIIELPKYSLFELSDGSRRMLASILSTNNKRGEIHKGNQIFLSQKFVKLLYHAKRISNTINENHRKYVENHKKEFEELFYYILEFNENYVGAKKNGKLLNSAFQSWQNHSIDELCSSFIGPTGSERKGLFELTSRGSAADFEFLGVKIPRYRDYTPSSLLKDATLIHQSVTGLYETRIDLAKLGEG

SEQ ID NO: 1315 - protein, 1388 aa, Streptococcus thermophilus
MTKPYSIGLDIGTNSVGWAVITDNYKVPSKKMKVLGNTSKKYIKKNLLGVLLFDSGITAEGRRLKRTARRRYTRRRNRILYLQEIFSTEMATLDDAFFQRLDDSFLVPDDKRDSKYPIFGNLVEEKAYHDEFPTIYHLRKYLADSTKKADLRLVYLALAHMIKYRGHFLIEGEFNSKNNDIQKNFQDFLDTYNAIFESDLSLENSKQLEEIVKDKISKLEKKDRILKLFPGEKNSGIFSEFLKLIVGNQADFRKCFNLDEKASLHFSKESYDEDLETLLGYIGDDYSDVFLKAKKLYDAILLSGFLTVTDNETEAPLSSAMIKRYNEHKEDLALLKEYIRNISLKTYNEVFKDDTKNGYAGYIDGKTNQEDFYVYLKNLLAEFEGADYFLEKIDREDFLRKQRTFDNGSIPYQIHLQEMRAILDKQAKFYPFLAKNKERIEKILTFRIPYYVGPLARGNSDFAWSIRKRNEKITPWNFEDVIDKESSAEAFINRMTSFDLYLPEEKVLPKHSLLYETFNVYNELTKVRFIAESMRDYQFLDSKQKKDIVRLYFKDKRKVTDKDIIEYLHAIYGYDGIELKGIEKQFNSSLSTYHDLLNIINDKEFLDDSSNEAIIEEIIHTLTIFEDREMIKQRLSKFENIFDKSVLKKLSRRHYTGWGKLSAKLINGIRDEKSGNTILDYLIDDGISNRNFMQLIHDDALSFKKKIQKAQIIGDEDKGNIKEVVKSLPGSPAIKKGILQSIKIVDELVKVMGGRKPESIVVEMARENQYTNQGKSNSQQRLKRLEKSLKELGSKILKENIPAKLSKIDNNALQNDRLYLYYLQNGKDMYTGDDLDIDRLSNYDIDHIIPQAFLKDNSIDNKVLVSSASNRGKSDDFPSLEVVKKRKTFWYQLLKSKLISQRKFDNLTKAERGGLLPEDKAGFIQRQLVETRQITKHVARLLDEKFNNKKDENNRAVRTVKIITLKSTLVSQFRKDFELYKVREINDFHHAHDAYLNAVIASALLKKYPKLEPEFVYGDYPKYNSFRERKSATEKVYFYSNIMNIFKKSISLADGRVIERPLIEVNEETGESVWNKESDLATVRRVLSYPQVNVVKKVEEQNHGLDRGKPKGLFNANLSSKPKPNSNENLVGAKEYLDPKKYGGYAGISNSFAVLVKGTIEKGAKKKITNVLEFQGISILDRINYRKDKLNFLLEKGYKDIELIIELPKYSLFELSDGSRRMLASILSTNNKRGEIHKGNQIFLSQKFVKLLYHAKRISNTINENHRKYVENHKKEFEELFYYILEFNENYVGAKKNGKLLNSAFQSWQNHSIDELCSSFIGPTGSERKGLFELTSRGSAADFEFLGVKIPRYRDYTPSSLLKDATLIHQSVTGLYETRIDLAKLGEG

SEQ ID NO: 1316 - protein, 595 aa, Streptococcus thermophilus
MVQFRKANSSIFGKGWHNFSVKLMMELIPELYETSEEQMTILKRLGKQKTTSSSNKTKYIDEKLLTEEIYNPVVAKSVRQAIKIVNAAIKEYGDFDNIVIEMARETNEDDEKKAIQKIQKANKDEKDAAMLKAANQYNGKAELPHSVFHGHKQLATKIRLWHQQGERCLYTGKTISIHDLINNPNQFEVDHILPLSITFDDSLANKVLVYATANQEKGQRTPYQALDSMDDAWSFRELKAFVRESKTLSNKKKEYLLTEEDISKFDVRKKFIERNLVDTRYASRVVLNALQEHFRAHKIDTKVSVVRGQFTSQLRRHWGIEKTRDTYHHHAVDALIIAASSQLNLWKKQKNTLVSYSEDQFLDIETGELISDDEYKESVFKAPYQHFVDTLKSKEFEDSILFSYQVDSKFNRKISDATIYATRKAKLDKEKKEYTYTLGKIKDIYTQAGYDAFIKIYKKDKSKFLMYHHDPQTFEKVIEPILENYPNKEINEKGKEVPCNPFLKYKEEHGYIRKYSKKGNGPEIKSFKYYDNLLGRHIDITPKNSKNIVALRKLNPWRTDVYFNHETMKYEFLGLKYADISYKKSKNKAGDFLPK

SEQ ID NO: 1317 - protein, 1388 aa, Streptococcus thermophilus
MTKPYSIGLDIGTNSVGWAVITDNYKVPSKKMKVLGNTSKKYIKKNLLGVLLFDSGITAEGRRLKRTARRRYTRRRNRILYLQEIFSTEMATLDDAFFQRLDDSFLVPDDKRDSKYPIFGNLVEEKVYHDEFPTIYHLRKYLADSTKKADLRLVYLALAHMIKYRGHFLIEGEFNSKNNDIQKNFQDFLDTYNAIFESDLSLENSKQLEEIVKDKISKLEKKDRILKLFPGEKNSGIFSEFLKLIVGNQADFRKCFNLDEKASLHFSKESYDEDLETLLGYIGDDYSDVFLKAKKLYDAILLSGFLTVTDNETEAPLSSAMIKRYNEHKEDLALLKEYIRNISLKTYNEVFKDDTKNGYAGYIDGKTNQEDFYVYLKNLLAEFEGADYFLEKIDREDFLRKQRTFDNGSIPYQIHLQEMRAILDKQAKFYPFLAKNKERIEKILTFRIPYYVGPLARGNSDFAWSIRKRNEKITPWNFEDVIDKESSAEAFINRMTSFDLYLPEEKVLPKHSLLYETFNVYNELTKVRFIAESMRDYQFLDSKQKKDIVRLYFKDKRKVTDKDIIEYLHAIYGYDGIELKGIEKQFNSSLSTYHDLLNIINDKEFLDDSSNEAIIEEIIHTLTIFEDREMIKQRLSKFENIFDKSVLKKLSRRHYTGWGKLSAKLINGIRDEKSGNTILDYLIDDGISNRNFMQLIHDDALSFKKKIQKAQIIGDEDKGNIKEVVKSLPGSPAIKKGILQSIKIVDELVKVMGGRKPESIVVEMARENQYTNQGKSNSQQRLKRLEKSLKELGSKILKENIPAKLSKIDNNALQNDRLYLYYLQNGKDMYTGDDLDIDRLSNYDIDHIIPQAFLKDNSIDNKVLVSSASNRGKSDDFPSLEVVKKRKTFWYQLLKSKLISQRKFDNLTKAERGGLLPEDKAGFIQRQLVETRQITKHVARLLDEKFNNKKDENNRAVRTVKIITLKSTLVSQFRKDFELYKVREINDFHHAHDAYLNAVIASALLKKYPKLEPEFVYGDYPKYNSFRERKSATEKVYFYSNIMNIFKKSISLADGRVIERPLIEVNEETGESVWNKESDLATVRRVLSYPQVNVVKKVEEQNHGLDRGKPKGLFNANLSSKPKPNSNENLVGAKEYLDPKKYGGYAGISNSFAVLVKGTIEKGAKKKITNVLEFQGISILDRINYRKDKLNFLLEKGYKDIELIIELPKYSLFELSDGSRRMLASILSTNNKRGEIHKGNQIFLSQKFVKLLYHAKRISNTINENHRKYVENHKKEFEELFYYILEFNENYVGAKKNGKLLNSAFQSWQNHSIDELCSSFIGPTGSERKGLFELTSRGSAADFEFLGVKIPRYRDYTPSSLLKDATLIHQSVTGLYETRIDLAKLGEG

SEQ ID NO: 1318 - protein, 1038 aa, Streptococcus vestibularis
MIDELSNEELFIALKNMVKHRGISYLDDASDDGNSSVGDYAQIVKENSKQLETKTPGQIQLERYQKYGQLRGDFTVEEDGKKHRLINVFPTSAYRAEALRILQTQQEFNSQITDEFINRYLEILTGKRKYYHGPGNEKSRTDYGRYRTSGETLDNIFGILIGKCTFYPEEFRAAKASYTAQEFNLLNDLNNLTVPTETKKLSEEQKNQIINYVKNEKAMGPAKLFKYIAKLLSCDIADIKGYRIDKSDKAEIHTFEAYRKMKTLETIDIEKMSREELDKLAYVLTLNTEREGIQEALEHEFVDGNFSQEQIDELVQFRKANSSIFGKGWHNFSVKLMMELIPELYATSEEQMTILTRLGKQKTTSSSNKTKYIDEKLLTEEIYNPVVAKSVRQAIKIVNAAIKEYGDFDNIVIEMARATNEDDEKKAIQKIQKANKDEKDAAMLKAANQYNGKAELPHSVFHGHKQLATKIRLWHQQGERCLYTGKTISIHDLINNPNQFEIDHILPLSITFDDSLANKVLVYATANQEKGQRTPYQALDSMDDAWSFRELKAFVRESKTLSNKKKEYLLTEEDISKFDVRKKFIERNLVDTRYASRVVLNALQEHFRAHKIDTKVSVVRGQFTSQLRRHWGIEKTRDTYHHHAVDALIIAASSQLNLWKKQKNTLVNYSENQLLDIETGELISDDEYKESVFKAPYQHFVDTLKSKEFEDSILFSYQVDSKFNRKISDATIYATRKAKLDKEKKEYTYTLGKIKDIYALGTKTPSKTGFYKFLDLYKKNKSQFLMYQKDRKTWDEVIEKILEQYRPFKEKDKNGKEVDFNPFEKYRIENGPIRKYSRKGNGPEIKSLKYYDNLLGRFVDITPSESKNPVALLSLNPWRTDVYYNTETRKYEFLGLKYADLCFEKGGSYGISKVKYNKIREKEGIGKNSEFKFTLYKNDLILIKDTETNRQQVFRFWSRTGKDNPKRFEKHKIELKPYEKARFEKGEELEVLGKVPPSSNQLQKNMQIENLSIFKVRTDVLGNQHIIKNEGDKPKLDF

SEQ ID NO: 1319 - protein, 97 aa, Streptococcus vestibularis
MSDLVLGLDIGIGSVGVGILNKVTGEIIHKNSRIFPAAQAENNVERRTNRQGRRLTRRKKHRRVRLNHLFEESGLITDFTKVSINLNPYQLRVKIDR

SEQ ID NO: 1320 - protein, 1084 aa, Subdoligranulum sp.
MKNTLYGIGLDIGVASVGWAVVGLNGTGEPVGLHRLGVRIFDKAEQPKTGESLAAPRRMARGMRRRLRRKALRRADVYALLERSGLSTREELAQMFEAGGLEDIYALRTRALDEPVGKAEFSRILLHLAQRRGFKSNRRTASDGEDGRLLAAVNENRRRMAQGGWRTVGEMLYRHEAFALHKRNKADDYLSTVGRDMVAEEASILFERQRAMGCSWAAPELQAEYLSILLRQRSFDEGPGGNSPYGGNQVEKMVGRCTFEPDEPRAAKAAYSFEYFSLLQKLNHIRLAENGETRPLTQPQRQQLLSLAHKTPDISLARIRKELALPETVQFNGVRCRANETLEESEKKEKFACLPAYHKMRKALDGVVKGRISSLSISQRDAAATALSLYKNEDTLRAKLTEAGFQAPEIDALAGLTGFSKFGHLSLKACRKLIPHLEQGLTYDQACTAAGYDFKGHGAGERAFTLPAAAPEMEQITSPVVRRAVAQTIKVVNGIIREMDASPAWVRIELARELSKTFGERQEMDRSMRENAAQNERLMQELRDTFHLLSPTGQDLVKYRLWKEQDGVCAYSLRRLDVERLFEPGYVDVDHIVPYSLSFDDRRSNKVLVLSSENRQKGNRLPLQYLQGKRREDFIVWTNSSVHDYRKRQNLLREKLSGDEAEGFRQRNLQDTQHMARFLYNYISDHLAFAQSEALGKKRVFAVSGAVTSHLRKRWGLSKVRADGDLHHALDAAVVACTTDGMIRRISGYYGHIEGEYLQDADGAGSQHARTKERFPAPWPRFRDELIVRLSEQPAEPLLDINPEFYCEYGTEHIRPVFVSRMPRRKVTGPGHKETIKGAAAADEGLLTVRKALTELKLDKDGEIKDYYMPSSDTLLYEALKAQLRRFGGDGKKAFAEPFYKPKADGTPGPLVRKVKTTEKATLTVPVHGGAASNDTMVRVDVFLVPGDGYYWVPVYTADTLKPELPNRAVVQGKPYSEWKEMREEDFIFSLYPNDLVYVEHKSGLKFTLQNADSTLEKTRTQTSAFAYFVSGSISTASITIRTHDNAYGIPSLGVKTLKTFHKYQVDVLGNVFPVHKETRQKFR

SEQ ID NO: 1321 - protein, 951 aa, Sutterella parvirubra
MPTVRPVFHSSASFDLGAKNTGLFLVNHPAGAAPSAEYAAAYTIVQPADGDGLNYSTTNRRAVRHRLRGGKRFKLARRLVLQVIDALRKLKPGLIRDEEMRRTVEALSSLLKRRGFTRIESEAQVDPTTLDSVDPAVFADHETLGGFFSLGIPISTQWDALSQNPGAVEQLFKALPSAKDFGKYVTEQFPEFAEQKKLYADAIKVLSSEAKSIVMQLGLGHHHRSKYFEMIAHDMLRDPRLQGVFELFGSEERFKTFICNVSNLQLRALRWYFDEPNPEVANQWNPEKFQVVWLRGLKYFHPDAERKADMKKLIDELTASKDILDALCTTDPRRTIPPYEDQNNRRPPFDQTLWLSAAELTRRYGDKWRIWSQKFERADRALSTGLDEILLYTDRRSRMFNRNQDPSVYADSYVLQRVLDRSSKLDRYALRALAAGYRTQELHEPLATLSDTLGTQHVETFLTFAAEYYEEVAAAKNGLWLDGPSRLLERADIHPPMKKKVLDLLLGNILDATPEIGRILRTVLWNRHVHEKSRSTPASLCRSIEAIRKDFGGEFRMRYDALDAKIRAAEDQKKKFKPTNAEEKDLFKAWNATKTMHAFLRDVLQLTPKQLERTASPYVFAQLHTLIDTERDGFTSTSLAAHLENHWRMRANAAGMAQCSRLPADAVRPFDGVLSKALDRQAFEAAKLAAQHLMSRKELTDTDIRYSIIIESNRFAFSASTAELKKNTLAKKNAEKGLNFELKRWQDKDSRIREASRGICAYTGAKLGDVVEYDHIIPRAFTTSAMGSVFNSEANLICVSRPGNQTKADKRYGLNKLHKTYLTAVFGTADVTTIAASIEDIVGKLASANRLRHFELLNEKEQDAVRHALFLDDESDARRIVLRELAAQNKSRVNGTQAWFVRAFMTKLLEITKDWRERTGNTLDIRSWKTDAEVASRLRSALNFHAEITLT

SEQ ID NO: 1322 - protein, 406 aa, Sutterella parvirubra
SNLFREEVPYGDHFLPIIQMKNRIYIGYQLPKADGTGGNAVAVLGKDPLELLETLKPFLDREPQAFSDHPVTYKMINERAYELLTKCALTPDQTTELERTQAEVLRSLNYQTSRAAVLGRLVDDKNKFVAKDAVWKEKDFVISFKLSPKKSAFKASGQLELPAKSDWKALVDSPELAINWGQPADDTFSQRIERKVRMNSSHLEHTPKKRVVSLPVVDKPSGGFRIRRHNLDGSAVFQVHTVANNKYGGFSADSAGKVDWSTPVLCGHLQHANLVPLDPETASAEQLVRMSEWRVVETTSDIRLEVCPGTSGRRYVRVELPFTLLQEWLTAGKVADVPVSPLHLPGSIKLTDPKTFCAEAQKTLSIFAQPRATIFFEQLGDRVRFRFEASGGPATMNAAYNAAGRS

SEQ ID NO: 1323 - protein, 389 aa, Sutterella wadsworthensis
MKACDLEEKTNHLQACVAIDLGARYTGTFSILHKSSHLPSKDDCRAATYVLPEDGGKMTYSQRNRTAVRHRIRGKKRFALARRMAMLIIREKLAAKSVTLTSSETRRLAEAVGSLLRRRGYNRLETETDNDLTVLENIEPEVFSEHEILGKYFYAGTDLAIQWETLSQDLSKISSLLAERLSEKDFKKYLTGLIPDDKNKIKHIISVFKMLIDEAESINMQCVLGHKHRTQYLSDIHADMHRDTRLSKAAEAFGGVDRLWRLLGNLSNLQLRAHRWYFNAPHLFDDQALEPARLQKTLVRAFKYLHCPQGVESRAQAELVKELEEADDIIDALCTIDPVRTIPPYENQQNRRPPFDQTLYLSPDLGVSGFLCLGRLFQGQPNEAALCFL

SEQ ID NO: 1324 - protein, 976 aa, Tannerella sp.
MKKILGLDLGSNSIGWALVNEAENRDEASSIIKLGVRVNPLTVDEMQNFEKGKSITTNADRTLKRSMRRNLQRYKLRRDALIKLLKKVGFITDGTILSEQGNRTTFETYRLRAKAPDEEISLQELARVLLMINKKRGYKSSRKIKEKEAGTLIDGMEVAKKLYDEDLTPGQLCLQLLESGKKSLPDFYSSDLQEEFDRIWNFQKQFNPKAFCDTAKEEIKGKNKSQTWAILAKYFIWMEEMDVWNEKESKTERVEKECKLVGLKRTVKKEEQRKENYCWRVQALTEQLDLEKVAVVLQEINGQISTSSGYLGAISDRSKVLYFNRQTVGQYQMAELEKNPNTSLRNMVFYRQDYLDEFDKIWEKQAEFHKELTVELKKEIRDIIIFYQRRLKSQKGLIGFCEFENREIMVEKNGKMQAKVVGCKVIPRSHPLFQEFKIWQTLNNVEVFAGEKKCKRKRTDAFPGLFDGTEDTLMVEGWRYLYQEEKEILAKELSVKKSLKKEYILKLLFDNPQDLDMNFEQIEGNDTGNVLFSAYSKMIEKYGYEPLDFGKPTDKIIEQLQVIFADLGWNTDLLFVDLNKEGKDLEKQPYFKLWHLLYSFEGDNTPTGNGKLVEKLMELCHVGKECALELVNISFQNDYGSLSAKAIKKILPYLKEGNRYDVACGYAGYRHSKSSLTKEEIENKVLKDKLDILPKNSLRNPVVEKILNQMVNVINAIIDTYGKPDEIRVELARELKKSAKEREELTKAIAKSTREHEEIRKVLQEEFGMINVSRNDIIRYKLYKELKDNGYKTLYSNQDIPKEKVFSKEIDIEHIIPQARLFDDSLSNKTLEYKAINIEKGNKTAYDFVKEKYGEKGLQQYLNRCESLFKGHRTKLRKLKMGQENIPEGFIDRDLRNTQYIAKKALAMLNEICRRVVATTGSITDRLREDWQLVDVLKELRCFRYFKDTKMKANHNKNIFYTSIKVDVSDTSKILK

SEQ ID NO: 1325 - protein, 1049 aa, Tistrella mobilis
MINERLTFGIDLGIGSCGWAVLRHADAAGEPGVIEGLGSWCFDVPETSKERIPTNQVRRSNRLLRRVIRRRRNRMAEIRRLFHAQGLLPSADEDALKRPRLDPWELRARGLDQCLSAEEFAVALGHIARHRGFRSSAKRKAANTSGEDSKMLSALLVTRERTARYRTVGEMFARDPEYSARRRNRDGIFDRTVARDDLIHEVGKLFEAQRARGSAFASPDLEADFNAIAFRQAEMQDSERLVGNCPFERDEKRAARWAPSFERFRLLTRLINLRIATAEGERRFTPEDLARVSAELGATAKLPVSRVRALIGLLPDERFTTIRVEDEDRDIVARTGEAAPGTWRLRKTLGEALWAEMQARPDQLDAIAHVLSFFEATAKIRSELDRLGLPAAVIEALDRGLEDGAFAKFKGAGHISAKACRNLLPHLQQGHRYDQACRLAGYDHAASTLSHTAQVVSKAGFNALVTELGESIANPIARKALTEGLKQIRAMCARWGLPGAIHIELAREVGNSIEKRRELESQRETTTKRRQTERDEIRGLLALEDVDDDTLLRYRLWKEQGGKCLYTGKDIHVRQLIATDNSVQVDHILPWSRFGDDSFNNKTLCLASANQRKRGQTPWEWFSLTGTPEAWEVFASRVETSKDLRGFKKRNLLLKNADEVAQRFRSRNLNDTRYAARLLAEAAKLFYPAGDRQEKDGRRRVLTRPGPLTAALRHAWGLESLKKADGKRVSDDRHHALDALAVAAISEREVQRLTRSFQEWEQQGLARPLRHVAPPWPGFRGDVLAAYAQAFVARPERRRARGKGHDASIRQVVGEGPEAQVFERRGLADLKEADLDRVKDPERNQAIIEAVRAWILAGRPADAPPRSPRGDVIVKLRTAPAKKIKPAVPVRGGTADRGDMVRIDVFTRPNRKGRDEWYLVPIYPHQVMNRKAWPHPPMRSVVAYKDEAGWTEIGAEHSFRFSLYPRSYVQLVKSNGDVIEGYLVSMDRSTGAFRVFVHNNPAEMAKGIGAKTLLNLRKFNVDRFGVRTEVKSEVRTWHGEVCTSPVPPD

SEQ ID NO: 1326 - protein, 1395 aa, Treponema denticola
MKKEIKDYFLGLDVGTGSVGWAVTDTDYKLLKANRKDLWGMRCFETAETAEVRRLHRGARRRIERRKKRIKLLQELFSQEIAKIDEGFFQRMKESPFYAEDKTILQENALFNDKDFTDKTYHKAYPTINHLIKAWIENKVKPDPRLLYLACHNIIKKRGHFLFEGDFDSENQFDTSIQALFEYLREDMEVDIDADSQKVKEILKDSSLKNSEKQSRLNKILGLKPSDKQKKAITNLISGNKINFADLYDNPDLKDAEKNSISFSKDDFDALSDDLASILGDSFELLLKAKAVYNCSVLSKVIGDEQYLSFAKVKIYEKHKTDLTKLKAVIKKHFPNNYKKVFGYNQDNESKNNYSGYVGVCKTKNKKLVINNSVNQEDFYKFLKPILSAKSEIKEVNDILAEIETGNFLPKQISKSNAEIPYQLRKMELEKILSNAEKHFSFLKQKDEKGLSHSEKIIMLLTFKIPYYIGPINDNHKKSFPDRCWVVKKEKSPSGKTTPWNFFDHIDKEKTAEEFITSRTNFCTYLIGESVLPKNSLLYSEYTVLNEINNLQIIIDGKNICDTKLKQKIYEDLFKKYKKITQKQISTFIKHEGICNKTDEVIILGIDKECTSSLKSYIELKNIFGKQVDEISTKNMLEEIIRWATIYDEGEGKTILKTKIKAEYGKYCSDEQIKKILNLKFSGWGRLSRKFLETVTSEMPGFSEPVNIITAMRETQNNLMELLSSEFKFTENIKKINSGFEDAEKQFSYDGLVKPLFLSPSVKKMLWQTLKLVKEISHITQAPPKKIFIEMAKGAELEPARTKTRLKILQDLYSSCKNDADAFSSEIQYLSGKIENEDNLRLRSDKLYLYYTQLGKCMYCGKPIEIGHVFDTSNYDIDHIYPQSKIKDDSISNRVLVCSSCNKNKEDKYPLKSEIQSKQRGFWNFLQRNNFISLEKLNRLTRTTPISDDETAKFIARQLVETRQATKVAAKVLEKMFPETKIVYSKAETVSMFRNKFDIIKCREINDFHHAHDAYLNIVVGNVYNTKFTNNPWNFIKEKRDNPKIADTYNYYKVFDYDVKRNNITAWEKGKTIITVKDMLKRNTPIYTRQAACKKGGLFDQTIMKKGLGQHPLKKEGPFSNISKYGGYNKVSAAYYTLIEYEEKGNKIRSLETIPLYLVKDIQKDQDVLKSYLTDLLGKKEFKILVPKIKINSLLKINGFPCHITGKTNDSFLLRPAVQFCCSNDEVLYFKKIIRFSEIRSQREKIGKTISPYEDLSFRSYIKENLCKKTKNDEIGEKEFYDLLQKKNLEIYDMLLTKHKDTIYKKRPNSATIDILVKGKEKFKSLIIENQFEVILEILKLFSATRNVSELQHIGGSKYSGVAKIGNKISSLDNCILIYQSITGIFEKRIDLLKV

SEQ ID NO: 1327 - protein, 769 aa, Treponema denticola
MKKEIKDYFLGLDVGTGSVGWAVTDTDYKLLKANRKDLWGMRCFETAETAEVRRLHRGARRRIERRKKRIKLLQELFSQEIAKIDEGFFQRMKESPFYAEDKTILQENALFNDKDFTDKTYHKAYPTINHLIKAWIENKVKPDPRLLYLACHNIIKKRGHFLFEGDFDSENQFDTSIQALFEYLREDMEVDIDADSQKVKEILKDSSLKNSEKQSRLNKILGLKPSDKQKKAITNLISGNKINFADLYDNPDLKDAEKNSISFSKDDFDALSDDLASILGDSFELLLKAKAVYNCSVLSKVIGDEQYLSFAKVKIYEKHKTDLTKLKAVIKKHFPNNYKKVFGYNQDNESKNNYSGYVGVCKTKNKKLVINNSVNQEDFYKFLKPILSAKSEIKEVNDILAEIETGNFLPKQISKSNAEIPYQLRKMELEKILSNAEKHFSFLKQKDEKGLSHSEKIIMLLTFKIPYYIGPINDNHKKSFPDRCWVVKKEKSPSGKTTPWNFFDHIDKEKTAEEFITSRTNFCTYLIGESVLPKNSLLYSEYTVLNEINNLQIIIDGKNICDTKLKQKIYEDLFKKYKKITQKQISTFIKHEGICNKTDEVIILGIDKECTSSLKSYIELKNIFGKQVDEISTKNMLEEIIRWATIYDEGEGKTILKTKIKAEYGKYCSDEQIKKILNLKFSGWGRLSRKFLETVTSEMPGFSEPVNIITAMRETQNNLMELLSSEFKFTENIKKINSGFEDAEKQFSYDGLVKPLFLSPSVKKCCGRL

SEQ ID NO: 1328 - protein, 1395 aa, Treponema denticola
MKKEIKDYFLGLDVGTGSVGWAVTDTDYKLLKANRKDLWGMRCFETAETAEVRRLHRGARRRIERRKKRIKLLQELFSQEIAKIDEGFFQRMKESPFYAEDKTILQENALFNDKDFTDKTYHKAYPTINHLIKAWIENKVKPDPRLLYLACHNIIKKRGHFLFEGDFDSENQFDTSIQALFEYLREDMEVDIDADSQKVKEILKDSSLKNSEKQSRLNKILGLKPSDKQKKAITNLISGNKINFADLYDNPDLKDAEKNSISFSKDDFDALSDDLASILGDSFELLLKAKAVYNCSVLSKVIGDEQYLSFAKVKIYEKHKTDLTKLKAVIKKHFPNNYKKVFGYNQDNESKNNYSGYVGVCKTKNKKLVINNSVNQEDFYKFLKPILSAKSEIKEVNDILAEIETGNFLPKQISKSNAEIPYQLRKMELEKILSNAEKHFSFLKQKDEKGLSHSEKIIMLLTFKIPYYIGPINDNHKKSFPDRCWVVKKEKSPSGKTTPWNFFDHIDKEKTAEEFITSRTNFCTYLIGESVLPKNSLLYSEYTVLNEINNLQIIIDGKNICDTKLKQKIYEDLFKKYKKITQKQISTFIKHEGICNKTDEVIILGIDKECTSSLKSYIELKNIFGKQVDEISTKNMLEEIIRWATIYDEGEGKTILKTKIKAEYGKYCSDEQIKKILNLKFSGWGRLSRKFLETVTSEMPGFSEPVNIITAMRETQNNLMELLSSEFKFTENIKKINSGFEDAEKQFSYDGLVKPLFLSPSVKKMLWQTLKLVKEISHITQAPPKKIFIEMAKGAELEPARTKTRLKILQDLYSSCKNDADAFSSEIQYLSGKIENEDNLRLRSDKLYLYYTQLGKCMYCGKPIEIGHVFDTSNYDIDHIYPQSKIKDDSISNRVLVCSSCNKNKEDKYPLKSEIQSKQRGFWNFLQRNNFISLEKLNRLTRTTPISDDETAKFIARQLVETRQATKVAAKVLEKMFPETKIVYSKAETVSMFRNKFDIIKCREINDFHHAHDAYLNIVVGNVYNTKFTNNPWNFIKEKRDNPKIADTYNYYKVFDYDVKRNNITAWEKGKTIITVKDMLKRNTPIYTRQAACKKGELFNQTIMKKGLGQHPLKKEGPFSNISKYGGYNKVSAAYYTLIEYEEKVNKIRSLETIPLYLVKDIQKDQDVLKSYLTDLLGKKEIKILVPKIKINSLLKINGFPCHITGKTGDSFVLRPAVQFCCSNDEVLYFKKIIRFNEIRSQREKMGKTISPYEDLSFRSYIKENLCKKTKADEIGEKEFYDLLQKKNLEIYDMLLTKHKDTIYNKRPNSTTLGMLTKGRYEFINLKPKDQIIVMLEILKLFCTTREAIDLGLIKGKPAAGVATLGKKISNLDNCILIYQSITGIFEKRIDLLKV

SEQ ID NO: 1329 - protein, 1395 aa, Treponema denticola
MKKEIKDYFLGLDVGTGSVGWAVTDTDYKLLKANRKDLWGMRCFETAETAEVRRLHRGARRRIERRKKRIKLLQELFSQEIAKIDEGFFQRMKESPFYAEDKTILQENTLFNDKDFTDKTYHKAYPTINHLIKAWIENKVKPDPRLLYLACHNIIKKRGHFLFEGDFDSENQFDTSIQALFEYLREDMEVDIDADSQKVKEILKDSSLKNSEKQSRLNKILGLKPSDKQKKAITNLISGNKINFADLYDNPDLKDAEKNSISFSKDDFDALSDDLASILGDSFELLLKAKAVYNCSVLSKVIGDEQYLSFAKVKIYEKHKTDLTKLKNVIKKHFPKDYKKVFGYNKNEKNNNNYSGYVGVCKTKSKKLIINNSVNQEDFYKFLKTILSAKSEIKEVNDILTEIETGTFLPKQISKSNAEIPYQLRKMELEKILSNAEKHFSFLKQKDEKGLSHSEKIIMLLTFKIPYYIGPINDNHKKSFPDRCWVIKKEKSPSGKTTPWNFFDHIDKDKTAEAFITSRTNFCTYLVGESVLPKSSLLYSEYTVLNEINNLQIIIDGKNICDIKLKQKIYEELFKKYKKITQKQISTFIKHEGICNKTDEVIILGIDKECTSSLKSYIELKNIFGKQVDEISTKNMLEEIIRWATIYDEGEGKTILKTKIKAEYGKYCSDEQIKKILNLKFSGWGRLSRKFLETVTSEMPGFSEPVNIITAMRETQNNLMELLSSEFKFTENIKKINSGFEDAEKQFSYNGLVKPLFLSPSVKKMLWQTLKLVKEISHITQAPPKKIFIEMAKGAELEPARTKTRLKILQDLYNNCKNDADAFSSEIKDLSGKIENEDNLRLRSDKLYLYYTQLGKCMYCGKPIEIGHVFDTSNYDIDHIYPQSKIKDDSISNRVLVCSSCNKNKEDKYPLKSEIQSKQRGFWNFLQRNNFISLEKLNRLTRTTPISDDETAKFIARQLVETRQATKVAAKVLEKMFPETKIVYSKAETVSMFRNKFDIIKCREINDFHHAHDAYLNIVVGNVYNTKFTNNPWNFIKEKRDNPKIADTYNYYKVFDYDVKRNNITAWEKGKTIITVKDMLKRNTPIYTRQAACKKGGLFDQTIMKKGLGQHPLKKEGAFSNISKYGGYNKVSAAYYTLIEYEEKGNKIRSLETIPLYLVKDIQKDQDVLKSYLTDLLGKKEIKILVPKIKINSLLKINGFPCHITGKTGDSFVLRPAVQFCCSNDEVLYFKKIIRFNEIRSQREKMGKTISPYEDLSFRSYIKENLCKKTKADEIGEKEFYDLLQKKNLEIYDMLLTKHKDTIYNKRPNSTTLGMLTKGRYEFINLKPKDQIIVMLEILKLFCTTREAIDLGLIKGKPAAGVATLGKKISNPDNCILIYQSITGIFEKRIDLLKV

SEQ ID NO: 1330 - protein, 1395 aa, Treponema denticola
MKKEIKDYFLGLDVGTGSVGWAVTDTDYKLLKANRKDLWGMRCFETAETAEVRRLHRGARRRIERRKKRIKLLQELFSQEIAKIDEGFFQRMKESPLYAEDKTILQENTLFNDKDFTDKTYHKAYPTINHLIKAWIENKVKPDPRLLYLACHNIIKKRGHFLFEGDFDSENQFDTSIQALFEYLREDMELDIDADSQKVKEILKDSSLKNSEKQSRLNKMLGLKPSDKQKKAITNLISGNKINFADLYDNPDLKDAEKNSISFSKDDFDALSDDLASILGDSFELLLKAKAVYNCSVLSKVIGDEQYLSFAKVKIYEKHKTDLTKLKNVIKKHFPKDYKKVFGYNKNEKNNNNYSAYVGVCKITHKKLVIKNSASQEDFYKFLKTILSAKSEIKEVNDILTEIETGTFLPKQISKSNAEIPYQLRKMELEKILSNAEKHFSFLKQKDEKGLSHSEKIIMLLTFKIPYYIGPINDNHKKSFPDRCWVVKKEKSPSGKTTPWNFFDHIDKEKTAEEFITSRTNFCTYLIGESVLPKSSLLYSEYTVLNEINNLQIIIDGKNICDIKLKQKIYEELFKKYKKITQKQISTFIKHEGICNKTDEVIILGIDKECTSSLKSYIELKNIFGKQVDEISTKNMLEEIIRWATIYDEGEGKTILKTKIKAEYGKYCSDEQIKKILNLKFSGWGRLSRKFLETVTSEMPGFSEPVNIITAMRETQNNLMELLSSEFKFTENIKKINSGFEDAEKQFSYNGLVKPLFLSPSVKKMLWQTLKLVKEISHITQAPPKKIFIEMAKGAELEPARTKTRLKILQDLYSSCKNDADAFSSEIQYLSGKIENEDNLRLRSDKLYLYYTQLGKCMYCGKPIEIGHVFDTSNYDIDHIYPQSKIKDDSISNRVLVCSSCNKNKEDKYPLKAEIQSKQRGFWNFLQRNNFISLEKLNRLTRTSPISDDETAKFIARQLVETRQATKVAAKVLEKMFPETKIVYSKAETVSMFRNKFDIIKCREINDFHHAHDAYLNIVVGNVYNTKFTNNPWNFIKEKRDNPKIADTYNYYKVFDYDVKRNNITAWEKGKTIITVKDMLKRNTPIYTRQAACKKGELFNQTIMKKGLGQHPLKKEGPLSNISKYGGYNKVSAAYYTLIEYEEKGSKIRSLETIPLYLVKDIQKNKDGLKSYLTDQIGKKEIKILIPKIKINSLLKINGFPCHITGKMGEAFVLRPAVQFCCSNDEALYFKKIIRFNEIRKQREKMGKTISPYEDLSFRSYIKDNLCKKTKADEIEEKEFYDLLQKKNLEIYDMLLTKHKDTIYKKRPNSATIDILVKGKEKFKSLIIENQFEVILEILKLFSATRNVSDLQHIGGSKNAGNARVGNKISSLDNCILIYQSITGIFEKRIDLLKI

SEQ ID NO: 1331 - protein, 1395 aa, Treponema denticola
MKKEIKDYFLGLDVGTGSVGWAVTDTDYKLLKANRKDLWGMRCFETAETAEVRRLHRGARRRIERRKKRIKLLQELFSQEIAKIDEGFFQRMKESPLYAEDKTILQENTLFNDKDFTDKTYHKAYPTINHLIKAWIENKVKPDPRLLYLACHNIIKKRGHFLFEGDFDSENQFDTSIQALFEYLREDMEVDIDADSQKVKEILKDSSLKNSEKQSRLNKMLGLKPSDKQKKAITNLISGNKINFADLYDNPDLKDAEKNSISFSKDDFDALSDDLASILGDSFELLLKAKAVYNCSVLSKVIGDEQYLSFAKVKIYEKHKTDLTKLKNVIKKHFPKDYKKVFGYNKNEKNNNNYSGYVGVCKTKSKKLIINNSVNQEDFYKFLKTILSAKSEIKEVNDILTEIETGTFLPKQISKSNAEIPYQLRKMELEKILSNAEKHFSFLKQKDEKGLSHSEKIIMLLTFKIPYYIGPINDNHKKSFPDRCWVVKKEKSPSGKTTPWNFFDHIDKEKTAEEFITSRTNFCTYLIGESVLPKNSLLYSEYTVLNEINNLQIIIDGKNICDTKLKQKIYEELFKKYKKITQKQISTFIKHEGICNKTDEVIILGIDKECTSSLKSYIELKNIFGKQVDEISTKNMLEEIIRWATIYDEGEGKTILKTKIKAEYGKYCSDEQIKKILNLKFSGWGRLSRKFLETVTSEMPGFSEPVNIITAMRETQNNLMELLSSEFKFTENIKKINSGFEDVEKQFSYDGLVKPLFLSPSVKKMLWQTLKLVKEISHITQAPPKKIFIEMAKGAELDPVRTKTRLKILQDLYNNCKNDADAFSSEIKDLSGKIENEDNLRLRSDKLYLYYTQLGKCMYCGKPIEIGHVFDTSNYDIDHIYPQSKIKDDSISNRVLVCSSCNKNKEDKYPLKAEIQSKQRGFWNFLQRNNFISLEKFNRLTRATPISDDETAKFIARQLVETRQATKVAARVLEKMFPETKIVYSKAETVSMFRNKFDIVKCREINDFHHAHDAYLNIVVGNVYNTKFTNNLWNFIKEKRDNPKIADTYNYYKVFDYDVKRNNITAWEKGKTIITVKDMLKRNTPIYTRQAACKKGGLFDQTIMKKGLGQHPLKKEGPFSNISKYGGYNKVSAAYYTLIEYEEKGNKIRSLETIPLYLVKDIQKDQDVLKSYLTDLLGKKEFKILVPKIKINSLLKINGFPCHITGKTNDSFLLRPAVQFCCSNDEVLYFKKIIRFSEIRSQREKIGKTISPYEDLSFRSYIKENLCKKTKNDEIGEKEFYDLLQKKNLEIYDMLLTKHKDTIYKKRPNSATIDILVKGKEKFKSLIIENQFEVILEILKLFSATRNVSDLQHIGGSKYSGVAKIGNKISSLDNCILIYQSITGIFEKRIDLLKV

SEQ ID NO: 1332 - protein, 357 aa, Treponema denticola
MKKEIKDYFLGLDVGTGSVGWAVTDTDYKLLKANRKDLWGMRCFETAETAEVRRLHRGARRRIERRKKRIKLLQELFSQEIAKTDEGFFQRMKESPFYAEDKTILQENALFNDRDFTDKTYHKAYPTINHLIKAWIENKVKPDPRLLYLACHNIIKKRGHFLFEGDFDSENQFDTSIQAFFEYLREDMEVDIDADSQKIKEILKDSSLKNSEKQSRLNKILGLKSSDKQKKAITNLISGNKINFADLYDNPDLKDAEKNSISFSKDDFDALSDDLASILGDSFELLLKAKAVYNCSVLSKVIGDEQYLSFAKVKIYEKHKTDLTKLKNVIKKHFPKDYKKVFGYNKNEKITTITPDM

SEQ ID NO: 1333 - protein, 1395 aa, Treponema denticola
MKKEIKDYFLGLDVGTGSVGWAVTDTDYKLLKANRKDLWGMRCFETAETAEVRRLHRGARRRIERRKKRIKLLQELFSQEIAKTDEGFFQRMKESPFYAEDKTILQENALFNDRDFTDKTYHKAYPTINHLIKAWIENKVKPDPRLLYLACHNIIKKRGHFLFEGDFDSENQFDTSIQALFEYLREDMEVDIDADSQKVKEILKDSSLKNSEKQSRLNKMLGLKPSDKQKKAITNLISGNKINFADLYDNPDLKDAEKNSISFSKDDFDALSDDLASILGDSFELLLKAKAVYNCSVLSKVIGDEQYLSFAKVKIYEKHKTDLTKLKNVIKKHFPNDYKKVFGYNKNEKNNNNYSAYVGVCKTKSKKLVINNTVNQEDFYKFLKPILLAKSEIKEVNDILTEIETGTFLPKQISKSNAEIPYQLRKMELEKILSNAEKHFSFLKQKDEKGLSHSEKIIMLLTFKIPYYIGPINDNHKKSFPDRCWVIKKEKSPSGKTTPWNFFDHIDKDKTAEAFITSRTNFCTYLVGESVLPKNSLLYSEYTVLNEINNLQIIIDGKNICDIKLKQKIYEELFKKYKKITQKQISTFIKHEGICNKTDEVIILGIDKECTSSLKSYIELKNIFGKQVDEISTKNMLEEIIRWATIYDEGEGKTILKTKIKAEYGKYCSDEQIKKILNLKFSGWGRLSRKFLETVTSEMPGFSEPVNIITAMRETQNNLMELLSSEFKFTENIKKINSGFEDVEKQFSYDSLVKPLFLSPSVKKMLWQTLKLVKEISHITQAPPKKIFIEMAKGAELDPVRTKTRLKILQDLYNNCKNDADAFSSEIKDLSGKIENEDNLRLRSDKLYLYYTQLGKCMYCGKPIEIGHVFDTSNYDIDHIYPQSKIKDDSISNRVLVCSSCNKNKEDKYPLKAEIQSKQRGFWNFLQRNNFISLEKLNRLTRTSPISDDETAKFIARQLVETRQATKVAAKVLEKMFPETKIVYSKAETVSMFRNKFDIIKCREINDFHHAHDAYLNIVVGNVYNTKFTNNPWNFIKEKRDNPKIADTYNYYKVFDYDVKRNNITAWEKGKTIITVKDMLKRNTPIYTRQAACKKGELFNQTIMKKGLGQHPLKKEGPLSNISKYGGYNKVSAAYYTLIEYEEKGSKIRSLETIPLYLVKDIQKNKDGLKSYLTDQIGKKEIKILIPKIKINSLLKINGFPCHITGKMGEAFVLRPAVQFCCSNDEALYFKKIIRFNEIRKQREKMGKTISPYEDLSFRSYIKDNLCKKTKADEIEEKEFYDLLQKKNLEIYDMLLTKHKDTIYKKRPNSATIDILVKGKEKFKSLIIENQFEVILEILKLFSATRNVSDLQHIGGSKNAGNARVGNKISSLDNCILIYQSITGIFEKRIDLLKI

SEQ ID NO: 1334 - protein, 631 aa, Treponema denticola
MLWQTLKLVKEISHITQAPPKKIFIEMAKGAELEPARTKTRLKILQDLYNNCKNDADAFSSEIKDLSGKIENEDNLRLRSDKLYLYYTQLGKCMYCGKPIEIGHVFDTSNYDIDHIYPQSKIKDDSISNRVLVCSSCNKNKEDKYPLRSEIQSKQRGFWNFLQRNNFISLEKLNRLTRTTPISDDETAKFIARQLVETRQATKVAAKVLEKMFPETKIVYSKAETVSMFRNKFDIVKCREINDFHHAHDAYLNIVVGNIYNTKFTNNPWNFIKEKRDNPKIADTYNYYKVFDYDVKRNNITAWEKGKTIITVKDMLKRNTPIYTRQAACKKGGLFDQTIMKKGLGQHPLKKEGPFSNISKYGGYNKVSAAYYTLIEYEEKENKIRSLETIPLYLVKDIQKSQEKLKSYLTDLLGKKEIKILVPKIKINSLLKINGFPCHITGKTNDSFLLRPAVQFCCSNDEVLYFKKIIRFNEIRSQREKMGKTISPYEDLSFRSYIKENLCKKTKNDEIGEKEFYDLLQKKNLEIYDMLLTKHKDTIYNKRPNSTTLGMLTKGRYEFINLKPKDQIIVMLEILKLFCTTREAIDLGLIKGKPAAGVATLGKKISNLDNCILIYQSITGIFEKRIDLLKV

SEQ ID NO: 1335 - protein, 631 aa, Treponema denticola
MLWQTLKLVKEISHITQAPPKKIFIEMAKGAELEPARTKTRLKILQDLYSSCKNDADAFSSEIQYLSGKIENEDNLRLRSDKLYLYYTQLGKCMYCGKPIEIGHVFDTSNYDIDHIYPQSKIKDDSISNRVLVCSSCNKNKEDKYPLKSEIQSKQRGFWNFLQRNNFISLEKLNRLTRTTPISDDETAKFIARQLVETRQATKVAAKVLEKMFPETKIVYSKAETVSMFRNKFDIIKCREINDFHHAHDAYLNIVVGNVYNTKFTNNPWNFIKEKRDNPKIADTYNYYKVFDYDVKRNNITAWEKGKTIITVKDMLKRNTPIYTRQAACKKGELFNQTIMKKGLGQHPLKKEGPFSNISKYGGYNKVSAAYYTLIEYEEKVNKIRSLETIPLYLVKDIQKDQDVLKSYLTDLLGKKEIKILVPKIKINSLLKINGFPCHITGKTGDSFVLRPAVQFCCSNDEVLYFKKIIRFNEIRSQREKMGKTISPYEDLSFRSYIKENLCKKTKADEIGEKEFYDLLQKKNLEIYDMLLTKHKDTIYNKRPNSTTLGMLTKGRYEFINLKPKDQIIVMLEILKLFCTTREAIDLGLIKGKPAAGVATLGKKISNLDNCILIYQSITGIFEKRIDLLKV

SEQ ID NO: 1336 - protein, 370 aa, Treponema denticola
MTEIETGTFLPKQISKSNAEIPYQLRKMELEKILSNAEKHFSFLKQKDEKGLSHSEKIIMLLTFKIPYYIGPINDNHKKSFPDRCWVVKKEKSPSGKTTPWNFFDHIDKEKTAEEFITSRTNFCTYLVGESVLPKSSLLYSEYTVLNEINNLQIIIDGKNICDIKLKQKIYEELFKKYKKITQKQISTFIKHEGICNKTDEVIILGIDKECTSSLKSYIELKNIFGKQVDEISTKNMLEDIIRWAAIYDEGEGKTILKTKIKAEYGKYCSDEQIKKILNLKFSGWGRLSRKFLETVTSEMPGFSEPVNIITAMRETQNNLMELLSSEFKFTENIKKINSGFEDVEKQFSYDGLVKPLFLSPSVKKCCGRL

SEQ ID NO: 1337 - protein, 591 aa, Treponema phagedenis
MARGKEAEKGRTSSRYASIKALYENCKQDLADYDAVLEQFKSEEPLRLRSDKLYLYYTQLGRCMYTGRVIDIDRLMSDNSAYDIDHIYPRSKIKDDSLTNRVLVVKDANQDKRDEPLSPQIQDKQKGFWDFLKHNNFISIEKYERLTYRGYFTEEMLSGFIARQLVETRQGTKTAGQILEQLYPDSTVVYCKAANTSEFRQKFNLIKCREINDLHHAHDAYLNIAVGNVYYTKFTSNPRNFMKLKEPYNLRELFDRDVERNNTIAWVKNKTITTIKDMLKRNTPLYTRYAYCKTGGFFDQNIMKKGKGQFPLKENSPLSDISKYGGYNKVSGAYFILVQKKEKDAVVRILETVPLYLLNKPGKESENVREYLSTALGTKDFKILIPKIKINSLFKINGFLVHITGKTNDRFLVRSAVQFFCDDNLTLFFKRIIAFNGLRNLNKDKSMTAYDDNTMRVYVRGNLFKDKNQLFDKNKFNEIVKGKNISVYKDMVKRYETSIYKFRPNTAVIPILKSGEDKFINLPIEEQFKILQEILKLFGAINGTANLTLIGGRPSTGEMKISNNISNLKQCILIHQSPTGVFEQQIDLLKI

SEQ ID NO: 1338 - protein, 1062 aa, Treponema sp.
MIMKLEKWRLGLDLGTNSIGWSVFSLDKDNSVQDLIDMGVRIFSDGRDPKTKEPLAVARRTARSQRKLIYRRKLRRKQVFKFLQEQGLFPKTKEECMTLKSLNPYELRIKALDEKLEPYELGRALFNLAVRRGFKSNRKDGSREEVSEKKSPDEIKTQADMQTHLEKAIKENGCRTITEFLYKNQGENGGIRFAPGRMTYYPTRKMYEEEFNLIRSKQEKYYPQVDWDDIYKAIFYQRPLKPQQRGYCIYENDKERTFKAMPCSQKLRILQDIGNLAYYEGGSKKRVELNDNQDKVLYELLNSKDKVTFDQMRKALCLADSNSFNLEENRDFLIGNPTAVKMRSKNRFGKLWDEIPLEEQDLIIETIITADEDDAVYEVIKKYDLTQEQRDFIVKNTILQSGTSMLCKEVSEKLVKRLEEIADLKYHEAVESLGYKFADQTVEKYDLLPYYGKVLPGSTMEIDLSAPETNPEKHYGKISNPTVHVALNQTRVVVNALIKEYGKPSQIAIELSRDLKNNVEKKAEIARKQNQRAKENIAINDTISALYHTAFPGKSFYPNRNDRMKYRLWSELGLGNKCIYCGKGISGAELFTKEIEIEHILPFSRTLLDAESNLTVAHSSCNAFKAERSPFEAFGTNPSGYSWQEIIQRANQLKNTSKKNKFSPNAMDSFEKDSSFIARQLSDNQYIAKAALRYLKCLVENPSDVWTTNGSMTKLLRDKWEMDSILCRKFTEKEVALLGLKPEQIGNYKKNRFDHRHHAIDAVVIGLTDRSMVQKLATKNSHKGNRIEIPEFPILRSDLIEKVKNIVVSFKPDHGAEGKLSKETLLGKIKLHGKETFVCRENIVSLSEKNLDDIVDEKIKSKVKDYVAKHKGQKIEAVLSDFSKENGIKKVRCVNRVQTPIEITSGKISRYLSPEDYFAAVIWEIPGEKKTFKAQYIRRNEVEKNSKGLNVVKPAVLENGKPHPAAKQVCLLHKDDYLEFSDKGKMYFCRIAGYAATNNKLDIRPVYAVSYCADWINSTNETMLTGYWKPTPTQNWVSVNVLFDKQKARLVTVSPIGRVFRK

SEQ ID NO: 1339 - protein, 281 aa, Treponema vincentii
MKTLGLDIGTNSIGWGIVDETANKIEDCGVYIFPEGVKKEKGNESSKAAERTSFRLARRLKFRRKLRKCETLKVLIKNKMCPLTMEELEKWRKQKIYPVSQDFLNWYRTDELKNWEPYFLRKKCAEQKAGPYEIGRALYHLAQRRGFLSNRKESTKASDGKVSKSIDELSSLMDGRTLGQYFYELKQSGEKVRGKYTSRKEHYEKEFNKICEVQEISPELKDDLYRAIFFQRKLKSQKFLVGKCTFERNKPRAPISHFEFEEFRMLSFINSIKIAKKLRRR

SEQ ID NO: 1340 - protein, 675 aa, unidentified
  REGION 1..675: note = Description of Unknown: uncultured bacterium polypeptide
MTAENYSNVRFAFDIGTNSIGWAVFQLNDKQEATSILNAGARIFSDGRDPKTFEPLAVRRRNVRSASRMRDRYLRRRKRTLDKLIGYGLLPEDKAERDKILLETNDKPSGSTDKKTDPYSLRARALEEKLPLAYVARALFHIGQRRGFKSNRKADRKSNEKGKIAAGIEELSGLMHQSHAPTLGAYLAKRREEGHVVRLRASSEALTNKAYAFYPERAMLEDEFHKIWQAQAEYYPDVLTKEREEELFHVMFFQRPLKEQKVGLCTLVEGELRLPKSDPLFQQFRLYKEINELAIILPDLSQRKLTMEERDTLITLMRPAKTKTFAALRKALKIPAGGRFNKETENRKQLTGDEVYSVFSKPELFGGDWAKFSIEQQREIIDQLNNEENPDKLEEWLKNKFPKLSDEQRSEIINANLPDGYGRFGITATSKILEQLKKDVISEAEAAHRCGFDHSLANRNWKGLDELPRYQEVLERHIVPGTGDKNDIYDIYKGRLTNPTVHIGLNQVRRLTNRLIKAYGKPWQIVVELARDLPMSSEERKEHNKTLNDNIKAGFERTQKLERLGQKDNANNRLLLKLWEELGKDPDDRKSIYSGTRITEPMLFSGEVEIDHILPFSLTYDDSYANKILCLREENRIKRNRAPADVTEWKDRYDEIIGRSKNCQRTNKNVLGPMQ

SEQ ID NO: 1341 - protein, 1017 aa, unidentified
  REGION 1..1017: note = Description of Unknown: uncultured bacterium polypeptide
MRVDSLGRCLSDEEWARVIYHLCKHRGFHWISRAEAKQTEGDSKSEGGKVKQGLAGTAKLMDEKGYRSAAEMVLAEFPEAQRNKQGEYRKALSRELLAKELALLFARQRVFGNRHATDTLETAILGNSDKKSGLFWQQKPALAGADLLKMLGTCTFEKNEYRAPKASFTAERHVWLTRLNNLRIVTDGITRQLTEQERQLVLPLPYRQAGDLTYKQLGMALTKAGLLEAGCFKFIGLAYPTEAQKAEGKTKDPESATLVKIPAWQELRQTLNKASLNDEWEKLSGDALCGQPEIFDKIAWILSVYKDDDEVRTELAKLVLPNPEGLTEALLNIRFDKFHALSLKALRAIVPHMEKGLRYDEACVQAGYHHSQLHKIGEGEHKYLPPLYDGRDGDGRMIFAEDADIPRNPVVLRSLNQARKVVNAIIRRYGSPSAVHIEMARDLSRPFDERNKIKKDQDEYQARNQRDREQFIELFGHPPKGLEFEKWRLYREQNGQCAYSQKPLASSGDVAEIFLDGSTEIDHALPYSRSFDDSKNNKVLVLTRENRDKGNRTPYEYLGGAENSERWQRFFSFVESNKAYRLAKRTRLLRKDFGAKESEEFRERNLNDTRYVCRFFKNYVEQHLKLAEGSEAKRCVVVSGQLTNFLRTRWGLLKIRSDSDRHHALDAAVVAACSHSMVQRLSNYSRTRELEQVRDGFVNIETGEIVNPAMHQQLREHFPDPWPYFRHELEARLKIDSPALLREEMARLSSYTEEELAALKPLFVSRAPQRRNGGAAHKDTIYGQPEKLKKNGSVSQKVALASLALKDIDLLADPHRNAKLYGAIRERLEAHGGKGDKAFPATNPLRKPDKEGNPTGPIVRTVTKVIDKLSGIPVRGGIAKNDTMLRVDVFTKAGRFHLVPVYVHHRVTGLPNQAITRGKDENQWAIIDDTFEWRFSLYPNDLVQIRLKDETHLGYYASTDRSTSSISIWAHDRNQSVGKDGLIRSIGVTTAKDIEKFHVDTLGNVYPAPPEKRRGLA

SEQ ID NO: 1342 - protein, 600 aa, unidentified
  REGION 1..600: note = Description of Unknown: uncultured bacterium polypeptide
VNAIIKKHGSLSAVHIEMARDLSRPLDERREVKKLQEEFKDRNDKARESFEADHGYRPKGIVFEKWMLYREQHGKCAYSMEGLDIDRVLNDANYAQIDHALPYSRSYDDSKNNKVLVLTRENQNKGNRTAYEYLTSFAGGEDGDRWRNYAAWVNSNKSYRMAKRNRLLRKNYGPDEASGFKDRNLNDTRYICKFFKNYVEEHLQLAPRADGNANKRCVVVNGQLTAFLRARWGLSKVRSESDRHHALDAAVVAACSHGMVKALADYARNKEVAYLREGFPDPETGEIINPEAHARGVHHFPEPWAHFRHELQVRLYSDDLQALREDLQRLGTYSEQDLLGVRTLFVSRAPQRRNDGAVHKETIYAQPEALRKQGGVVQKVPLTSLSLKDLDNLADPHRNAKLYTALRARLEAHGGKADKAFGPDQPFYKPDKNGNPTGPIVRTIKLVIDKLSGIPIRGGVAKNDTMLRVDVFTKAGKFHLVPVYVHHRVTGLPDRAIVAFKDEVEWTQVDDSFKFLFSIHPNDLIRIGLKAKEPMIGYFASCHRGTGAFNVWSHDRNTSVGKSGSVEGIGIKTALSLEKLNIDVLGNVYPARPEQRHGLA

SEQ ID NO: 1343 - protein, 1011 aa, unidentified
  REGION 1..1011: note = Description of Unknown: uncultured delta polypeptide
MSSKAIDSLEQLDLFKPQEYTLGLDLGIKSIGWAILSGERIANAGVYLFETAEELNSTGNKLISKAAERGRKRRIRRMLDRKARRGRHIRYLLEREGLPTDELEEVVVHQSNRTLWDVRAEAVERKLTKQELAAVLFHLVRHRGYFPNTKKLPPDDESDSADEEQGKINRATSRLREELKASDCKTIGQFLAQNRDRQRNREGDYSNLMARKLVFEEALQILAFQRKQGHELSKDFEKTYLDVLMGQRSGRSPKLGNCSLIPSELRAPSSAPSTEWFKFLQNLGNLQISNAYREEWSIDAPRRAQIIDACSQRSTSSYWQIRRDFQIPDEYRFNLVNYERRDPDVDLQEYLQQQERKTLANFRNWKQLEKIIGTGHPIQTLDEAARLITLIKDDEKLSDQLADLLPEASDKAITQLCELDFTTAAKISLEAMYRILPHMNQGMGFFDACQQESLPEIGVPPAGDRVPPFDEMYNPVVNRVLSQSRKLINAVIDEYGMPAKIRVELARDLGKGRELRERIKLDQLDKSKQNDQRAEDFRAEFQQAPRGDQSLRYRLWKEQNCTCPYSGRMIPVNSVLSEDTQIDHILPISQSFDNSLSNKVLCFTEENAQKSNRTPFEYLDAADFQRLEAISGNWPEAKRNKLLHKSFGKVAEEWKSRALNDTRYLTSALADHLRHHLPDSKIQTVNGRITGYLRKQWGLEKDRDKHTHHAVDAIVVACTTPAIVQQVTLYHQDIRRYKKLGEKRPTPWPETFRQDVLDVEEEIFITRQPKKVSGGIQTKDTLRKHRSKPDRQRVALTKVKLADLERLVEKDASNRNLYEHLKQCLEESGDQPTKAFKAPFYMPSGPEAKQRPILSKVTLLREKPEPPKQLTELSGGRRYDSMAQGRLDIYRYKPGGKRKDEYRVVLQRMIDLMRGEENVHVFQKGVPYDQGPEIEQNYTFLFSLYFDDLVEFQRSADSEVIRGYYRTFNIANGQLKISTYLEGRQDFDFFGANRLAHFAKVQVNLLGKVIK

SEQ ID NO: 1344 - protein, 1011 aa, Veillonella sp.; identical to SEQ ID NO: 1343

SEQ ID NO: 1345 - protein, 1120 aa, Veillonella sp.
MGFKANLVNLFTDEDIEVILPEEKEFKSINLHEGIYEDVRDAYEDAWGDRFAIVDQCKVLHDIIVISSIIKPGQSLSEAKIESYNQHKEDLVLLKSVLKEDRKLYDDMFVVDTDKGTNYVKYTKQGVNGNTSATQEEFYKYVRKVVSVLPETEHTRRIVQKLEEGTFLPLQRISKNGVVPYQLHKEELVRILDKATVNFPFLNKVENGLTVADKIISILEFKIPYYVGPLNPTHSIENGGFAWVVRKEAGQVLPWNFEQKVDVQASAVKFIENLTNKCTYLIDQDVLPKYSLLYAEFSLLNELNNIRVNDKPLPADVKQAFIRDHFISLQDSKTATKKVVAKYLVDNNYVSQPPIITGMDQQIATKLTSHRDMTRILGEHFDHAMAEDIIRYITIFGESKDMLRQVLKNYYGDRLTTEQIKKLGKLTYTGWGRLSKKFLSDIWGMKKNDDDAEAGTIIEHMREGQENLMQLLSSSYSFIDVVQEYVTNVLGEKEKTAFEMLEDLSLSPMVKRSVWQTLRILDEIVSIRKELPKKIFVEVARTNKADKKRTQSRKALLEELYKQIKDEDVHVLQQELESKEDSALNSKKLYLYFTQMGRCMYSGRRIDIHELFTDKYDIDHIYPRSLTKDDSWHNIVLVEKQLNAEKTDRFPILSAIQSKQKGFWKLLWDRGFISEKKYDRLVRTTDLTDEELNQFINRQMVSTNQSVKAVTTLLHQLYPETEVVFSKAENVSDFRHDYDFVKVRSINHHHHAKDAYLNIVVGNVYHEKFTKNFLSFAKQKGTRRTYNLTKIFEYEIKLTEESKKVIWDPNIHMDIVKKMMKSNDVRVTQRAVPQKGGLSDETIYKKGIAKRGVYLPLKSSDERVRDVEKYGGRTSITISEYIILNIRDTSDQDRIEIFSLPLYIAGKKDIHKAIEEAYLSTCKKPASVVDIQILYRGLYIGSKVNINGFTYYMGGKTGSNVSIDSAVDVVMDITSSVYIKLLEKVAIKKIENPKTFRIENIKTSYNHKEVTVSKEQNIALYQELLKKLDTPLFSKMKGNKLEEFRTVGFDTFIALSLEEQASVLLEVLNVLTNFKTKRDITKIGMTSSRSTLGINISNTEQFSVITTSITGLYEQEIKIK

SEQ ID NO: 1346 - protein, 983 aa, unidentified
  source 1..983: note = Verminephrobacter aporrectodeae
MRRRRDRLLKRKARMHDQLMRHGFFPADAAGRKVLERLNPYQLRAKGLHQALTPGEFARALFHINQRRGFQSNRKTDRKDNESGALKQAISELRAQIHDSGCATVGEWFWKERMQQKPEGVHRQGVRARYRETPYTTDEGRQRIDKRYDLYVDRAMIEQEFDALWAVQAALQPGLFTDAACKELRYTLLFQRKLRPVKPGRCTLLPEEERAPLALPSTQRFRILQEVNHLRLLDEALREVPLTLAQRDALVAALESQGKLGFAPMRKLLKLPGTVKFNLEDEKRTELKGNATSAILARKDLFGPAWAGFDAALQDEIVWQLVSEEGEGRLIAWLQQHTGVDEARAEAIADTSLPEGYGSLSRKALERIVPALQREVCSYDKAVQAAGFAHHSDLGFDFEHSGDEVQQVGERIIASTGEVRPLFAFKQLPYYGKALQRHVAFGSGKPEDPEEKRHGKIANPTVHIGLNQVRTVVNALIRRYGRPSEVVVELARDLKQSREQQQETQRKQAENQRRNTRIRERIAETLGISPERVRSSDIQKWILWEELSFDVVDRRCPYSGEQISTTMLLSPKVEIEHILPFSQTLDDSLNNRTVALREANRIKRNRTPWDARADFEARGWSYEGILHRAERMPLRKRYRFAPDGYQRWLGEDKDFLARALNDTRYLSRVAANYLRLVCPKPQGVRVIPGRMTAMLRAKFGLNDVLGLDGEKNRNDHRHHAVDACVIGVTDQGLMQRFARASAQAREDGLTRLVQDMPLPWPSYRDHVERAVRHIWVSHKPDHGFEGAMMEETAYGIRKDGSIKPRRKADGSAGREVVNLIRITESRQPVRHGVDSQGQPLPYKGYVGGSNYCIEITANDQGKWEGAVISTFEAYRIVRASGWGRLRHCSHGQNGRPLMMRLMIGDAVRLALDGSEKTMRVVKISANGQVFLVAPNEANVDARNRDKADPFAYVSKKAGSFQSAKARQVSISPIGELRDPGFKG

SEQ ID NO: 1347 - RNA, 28 nt, synthetic construct
  misc_feature 1..28: note = Description of Artificial Sequence: Synthetic oligonucleotide
  source 1..28: mol_type = other RNA
gttcactgccgtataggcagctaagaaa

SEQ ID NO: 1348 - RNA, 36 nt, synthetic construct
  misc_feature 1..36: note = Description of Artificial Sequence: Synthetic oligonucleotide
  source 1..36: mol_type = other RNA
gttgcaagggattgagccccgtaaggggattgcgac

SEQ ID NO: 1349 - RNA, 36 nt, synthetic construct
  misc_feature 1..36: note = Description of Artificial Sequence: Synthetic oligonucleotide
  source 1..36: mol_type = other RNA
gttgcaaacctcgttagcctcgtagaggattgaaac

SEQ ID NO: 1350 - RNA, 37 nt, synthetic construct
  misc_feature 1..37: note = Description of Artificial Sequence: Synthetic oligonucleotide
  source 1..37: mol_type = other RNA
ggatcgatacccaccccgaagaaaaggggacgagaac

SEQ ID NO: 1351 - RNA, 36 nt, synthetic construct
  misc_feature 1..36: note = Description of Artificial Sequence: Synthetic oligonucleotide
  source 1..36: mol_type = other RNA
gtcgtcagacccaaaaccccgagaggggacggaaac

SEQ ID NO: 1352 - RNA, 36 nt, synthetic construct
  misc_feature 1..36: note = Description of Artificial Sequence: Synthetic oligonucleotide
  source 1..36: mol_type = other RNA
gatataaacctaattacctcgagaggggacggaaac

SEQ ID NO: 1353 - RNA, 29 nt, synthetic construct
  misc_feature 1..29: note = Description of Artificial Sequence: Synthetic oligonucleotide
  source 1..29: mol_type = other RNA
ccccagtcacctcgggaggggacggaaac

SEQ ID NO: 1354 - RNA, 37 nt, synthetic construct
  misc_feature 1..37: note = Description of Artificial Sequence: Synthetic oligonucleotide
  source 1..37: mol_type = other RNA
gttccaattaatcttaaaccctattagggattgaaac

SEQ ID NO: 1355 - RNA, 32 nt, synthetic construct
  misc_feature 1..32: note = Description of Artificial Sequence: Synthetic oligonucleotide
  source 1..32: mol_type = other RNA
gtcgccccccacgcgggggcgtggattgaaac

SEQ ID NO: 1356 - RNA, 32 nt, synthetic construct
  misc_feature 1..32: note = Description of Artificial Sequence: Synthetic oligonucleotide
  source 1..32: mol_type = other RNA
ccagccgccttcgggcggctgtgtgttgaaac

SEQ ID NO: 1357 - RNA, 32 nt, synthetic construct
  misc_feature 1..32: note = Description of Artificial Sequence: Synthetic oligonucleotide
  source 1..32: mol_type = other RNA
gtcgcactctacatgagtgcgtggattgaaat

SEQ ID NO: 1358 - RNA, 33 nt, synthetic construct
  misc_feature 1..33: note = Description of Artificial Sequence: Synthetic oligonucleotide
  source 1..33: mol_type = other RNA
tgtcgcaccttatataggtgcgtggattgaaat

SEQ ID NO: 1359 - RNA, 32 nt, synthetic construct
  misc_feature 1..32: note = Description of Artificial Sequence: Synthetic oligonucleotide
  source 1..32: mol_type = other RNA
gtcgcgccccgcatggggcgcgtggattgaaa

SEQ ID NO: 1360 - protein, 6 aa, synthetic construct
  REGION 1..6: note = Description of Artificial Sequence: Synthetic 6xHis tag
HHHHHH

SEQ ID NO: 1361 - protein, 9 aa, synthetic construct
  REGION 1..9: note = Description of Artificial Sequence: Synthetic 9xHis tag
HHHHHHHHH

SEQ ID NO: 1362 - protein, 9 aa, unidentified
  REGION 1..9: note = Description of Unknown: 'LAGLIDADG' family motif peptide
LAGLIDADG

SEQ ID NO: 1363 - protein, 7 aa, Simian virus 40
PKKKRKV

SEQ ID NO: 1364 - DNA, 20 bp, synthetic construct
  misc_feature 1..20: note = Description of Artificial Sequence: Synthetic oligonucleotide
  source 1..20: mol_type = other DNA
agggtttattttcttacgct

SEQ ID NO: 1365 - DNA, 20 bp, synthetic construct
  misc_feature 1..20: note = Description of Artificial Sequence: Synthetic oligonucleotide
  source 1..20: mol_type = other DNA
ccgaggtccctagtccggaa

SEQ ID NO: 1366 - DNA, 20 bp, synthetic construct
  misc_feature 1..20: note = Description of Artificial Sequence: Synthetic oligonucleotide
  source 1..20: mol_type = other DNA
cggaggtgggcggagcctcc

SEQ ID NO: 1367 - DNA, 20 bp, synthetic construct
  misc_feature 1..20: note = Description of Artificial Sequence: Synthetic oligonucleotide
  source 1..20: mol_type = other DNA
agctttctcgtctgggtatt

SEQ ID NO: 1368 - DNA, 20 bp, synthetic construct
  misc_feature 1..20: note = Description of Artificial Sequence: Synthetic oligonucleotide
  source 1..20: mol_type = other DNA
gaaaataaatgttttttatt

SEQ ID NO: 1369 - DNA, 20 bp, synthetic construct
  misc_feature 1..20: note = Description of Artificial Sequence: Synthetic oligonucleotide
  source 1..20: mol_type = other DNA
acagaaactttatttctcat

SEQ ID NO: 1370 - DNA, 20 bp, synthetic construct
  misc_feature 1..20: note = Description of Artificial Sequence: Synthetic oligonucleotide
  source 1..20: mol_type = other DNA
ctttgggaggccgaggcggg

SEQ ID NO: 1371 - DNA, 20 bp, synthetic construct
  misc_feature 1..20: note = Description of Artificial Sequence: Synthetic oligonucleotide
  source 1..20: mol_type = other DNA
ttttagaaacagtatgagat

SEQ ID NO: 1372 - DNA, 20 bp, synthetic construct
  misc_feature 1..20: note = Description of Artificial Sequence: Synthetic oligonucleotide
  source 1..20: mol_type = other DNA
atgcacaaaataaacagcag

SEQ ID NO: 1373 - DNA, 20 bp, synthetic construct
  misc_feature 1..20: note = Description of Artificial Sequence: Synthetic oligonucleotide
  source 1..20: mol_type = other DNA
gagttagttcacatctacag

SEQ ID NO: 1374 - DNA, 146 bp, synthetic construct
  misc_feature 1..146: note = Description of Artificial Sequence: Synthetic polynucleotide
  source 1..146: mol_type = other DNA
agtaataatacgactcactatagggggccactagggacaggatgttttagagctatgctgttttggaaacaaaacagcatagcaagttaaaataaggctagtccgttatcaacttgaaaaagtggcaccgagtcggtgcttttttt

SEQ ID NO: 1375 - DNA, 126 bp, synthetic construct
  misc_feature 1..126: note = Description of Artificial Sequence: Synthetic polynucleotide
  source 1..126: mol_type = other DNA
agtaataatacgactcactatagggggccactagggacaggatgaaaaagagctagaaatagcaagtttttttaaggctagtccgttatcaacttgaaaaagtggcaccgagtcggtgcttttttt

SEQ ID NO: 1376 - DNA, 126 bp, synthetic construct
  misc_feature 1..126: note = Description of Artificial Sequence: Synthetic polynucleotide
  source 1..126: mol_type = other DNA
agtaataatacgactcactatagggggccactagggacaggatgatatagagctagaaatagcaagttatattaaggctagtccgttatcaacttgaaaaagtggcaccgagtcggtgcttttttt

SEQ ID NO: 1377 - DNA, 126 bp, synthetic construct
  misc_feature 1..126: note = Description of Artificial Sequence: Synthetic polynucleotide
  source 1..126: mol_type = other DNA
agtaataatacgactcactatagggggccactagggacaggatgttttagaggatgaaaatccaagttaaaataaggctagtccgttatcaacttgaaaaagtggcaccgagtcggtgcttttttt

SEQ ID NO: 1378 - DNA, 126 bp, synthetic construct
  misc_feature 1..126: note = Description of Artificial Sequence: Synthetic polynucleotide
  source 1..126: mol_type = other DNA
agtaataatacgactcactatagggggccactagggacaggatgaaaatgaggatgaaaatccaagtatttttaaggctagtccgttatcaacttgaaaaagtggcaccgagtcggtgcttttttt

SEQ ID NO: 1379 - DNA, 126 bp, synthetic construct
  misc_feature 1..126: note = Description of Artificial Sequence: Synthetic polynucleotide
  source 1..126: mol_type = other DNA
agtaataatacgactcactatagggggccactagggacaggatgattatgaggatgaaaatccaagtataattaaggctagtccgttatcaacttgaaaaagtggcaccgagtcggtgcttttttt

SEQ ID NO: 1380 - DNA, 126 bp, synthetic construct
  misc_feature 1..126: note = Description of Artificial Sequence: Synthetic polynucleotide
  source 1..126: mol_type = other DNA
agtaataatacgactcactatagggggccactagggacaggatgtaattgaggatgaaaatccaagtaattataaggctagtccgttatcaacttgaaaaagtggcaccgagtcggtgcttttttt

SEQ ID NO: 1381 - DNA, 126 bp, synthetic construct
  misc_feature 1..126: note = Description of Artificial Sequence: Synthetic polynucleotide
  source 1..126: mol_type = other DNA
agtaataatacgactcactatagggggccactagggacaggatgaaaatcaagtgatgaaaatcgagatttttaaggctagtccgttatcaacttgaaaaagtggcaccgagtcggtgcttttttt

SEQ ID NO: 1382 - DNA, 126 bp, synthetic construct
  misc_feature 1..126: note = Description of Artificial Sequence: Synthetic polynucleotide
  source 1..126: mol_type = other DNA
agtaataatacgactcactatagggggccactagggacaggatgaaaatgaaggatgaaaatccagtatttttaaggctagtccgttatcaacttgaaaaagtggcaccgagtcggtgcttttttt

SEQ ID NO: 1383 - DNA, 126 bp, synthetic construct
  misc_feature 1..126: note = Description of Artificial Sequence: Synthetic polynucleotide
  source 1..126: mol_type = other DNA
agtaataatacgactcactatagggggccactagggacaggatgatttagagctagaaatagcaagttaaattaaggctagtccgttatcaacttgaaaaagtggcaccgagtcggtgcttttttt

SEQ ID NO: 1384 - DNA, 126 bp, synthetic construct
  misc_feature 1..126: note = Description of Artificial Sequence: Synthetic polynucleotide
  source 1..126: mol_type = other DNA
agtaataatacgactcactatagggggccactagggacaggatgtctcagagctagaaatagcaagttgagataaggctagtccgttatcaacttgaaaaagtggcaccgagtcggtgcttttttt

SEQ ID NO: 1385 - DNA, 126 bp, synthetic construct
  misc_feature 1..126: note = Description of Artificial Sequence: Synthetic polynucleotide
  source 1..126: mol_type = other DNA
agtaataatacgactcactatagggggccactagggacaggatgtcccagagctagaaatagcaagttgggataaggctagtccgttatcaacttgaaaaagtggcaccgagtcggtgcttttttt

SEQ ID NO: 1386 - DNA, 126 bp, synthetic construct
  misc_feature 1..126: note = Description of Artificial Sequence: Synthetic polynucleotide
  source 1..126: mol_type = other DNA
agtaataatacgactcactatagggggccactagggacaggatgttttagactcagaaatcagaagttaaaataaggctagtccgttatcaacttgaaaaagtggcaccgagtcggtgcttttttt

SEQ ID NO: 1387 - DNA, 124 bp, synthetic construct
  misc_feature 1..124: note = Description of Artificial Sequence: Synthetic polynucleotide
  source 1..124: mol_type = other DNA
agtaataatacgactcactatagggggccactagggacaggatgttttagagctagaaatagctctaaaataaggctagtccgttatcaacttgaaaaagtggcaccgagtcggtgcttttttt

SEQ ID NO: 1388 - DNA, 118 bp, synthetic construct
  misc_feature 1..118: note = Description of Artificial Sequence: Synthetic polynucleotide
  source 1..118: mol_type = other DNA
agtaataatacgactcactatagggggccactagggacaggatgttttagaggaaactctaaaataaggctagtccgttatcaacttgaaaaagtggcaccgagtcggtgcttttttt

SEQ ID NO: 1389 - DNA, 112 bp, synthetic construct
  misc_feature 1..112: note = Description of Artificial Sequence: Synthetic polynucleotide
  source 1..112: mol_type = other DNA
agtaataatacgactcactatagggggccactagggacaggatgttttagaaataaaataaggctagtccgttatcaacttgaaaaagtggcaccgagtcggtgcttttttt

SEQ ID NO: 1390 - DNA, 126 bp, synthetic construct
  misc_feature 1..126: note = Description of Artificial Sequence: Synthetic polynucleotide
  source 1..126: mol_type = other DNA
agtaataatacgactcactatagggggccactagggacaggatattttagagctagaaatagcaagttaaaataaggctagtccgttatcaacttgaaaaagtggcaccgagtcggtgcttttttt

SEQ ID NO: 1391 - DNA, 126 bp, synthetic construct
  misc_feature 1..126: note = Description of Artificial Sequence: Synthetic polynucleotide
  source 1..126: mol_type = other DNA
agtaataatacgactcactatagggggccactagggacaggatattttagagctagaaatagcaagttaaaacaaggctagtccgttatcaacttgaaaaagtggcaccgagtcggtgcttttttt

SEQ ID NO: 1392 - DNA, 126 bp, synthetic construct
  misc_feature 1..126: note = Description of Artificial Sequence: Synthetic polynucleotide
  source 1..126: mol_type = other DNA
agtaataatacgactcactatagggggccactagggacaggatgacgatagaacggaaacgttggacatcgttaaggctagtccgttatcaacttgaaaaagtggcaccgagtcggtgcttttttt

SEQ ID NO: 1393 - DNA, 126 bp, synthetic construct
  misc_feature 1..126: note = Description of Artificial Sequence: Synthetic polynucleotide
  source 1..126: mol_type = other DNA
agtaataatacgactcactatagggggccactagggacaggatgacgatgagacggaaacgtcaagtatcgttaaggctagtccgttatcaacttgaaaaagtggcaccgagtcggtgcttttttt

SEQ ID NO: 1394 - DNA, 126 bp, synthetic construct
  misc_feature 1..126: note = Description of Artificial Sequence: Synthetic polynucleotide
  source 1..126: mol_type = other DNA
agtaataatacgactcactatagggggccactagggacaggatgttttaagactagaaatagtggactaaaataaggctagtccgttatcaacttgaaaaagtggcaccgagtcggtgcttttttt

SEQ ID NO: 1395 - DNA, 126 bp, synthetic construct
  misc_feature 1..126: note = Description of Artificial Sequence: Synthetic polynucleotide
  source 1..126: mol_type = other DNA
agtaataatacgactcactatagggggccactagggacaggatcgtttagagctagaaatagcaagttaaaataaggctagtccgttatcaacttgaaaaagtggcaccgagtcggtgcttttttt

SEQ ID NO: 1396 - DNA, 126 bp, synthetic construct
  misc_feature 1..126: note = Description of Artificial Sequence: Synthetic polynucleotide
  source 1..126: mol_type = other DNA
agtaataatacgactcactatagggggccactagggacaggatgtggtagagctagaaatagcaagttaaaataaggctagtccgttatcaacttgaaaaagtggcaccgagtcggtgcttttttt

SEQ ID NO: 1397 - DNA, 126 bp, synthetic construct
  misc_feature 1..126: note = Description of Artificial Sequence: Synthetic polynucleotide
  source 1..126: mol_type = other DNA
agtaataatacgactcactatagggggccactagggacaggatgtttgcgagctagaaatagcaagttaaaataaggctagtccgttatcaacttgaaaaagtggcaccgagtcggtgcttttttt

SEQ ID NO: 1398 - DNA, 126 bp, synthetic construct
  misc_feature 1..126: note = Description of Artificial Sequence: Synthetic polynucleotide
  source 1..126: mol_type = other DNA
agtaataatacgactcactatagggggccactagggacaggatgttttagagtgagaaatagcaagttcacataaggctagtccgttatcaacttgaaaaagtggcaccgagtcggtgcttttttt

SEQ ID NO: 1399 - DNA, 126 bp, synthetic construct
  misc_feature 1..126: note = Description of Artificial Sequence: Synthetic polynucleotide
  source 1..126: mol_type = other DNA
agtaataatacgactcactatagggggccactagggacaggatgttttagagctagaaatagcaagttacactaaggctagtccgttatcaacttgaaaaagtggcaccgagtcggtgcttttttt

SEQ ID NO: 1400 - DNA, 126 bp, synthetic construct
  misc_feature 1..126: note = Description of Artificial Sequence: Synthetic polynucleotide
  source 1..126: mol_type = other DNA
agtaataatacgactcactatagggggccactagggacaggatgttttagagctagaaatagcaagttaacagaaggctagtccgttatcaacttgaaaaagtggcaccgagtcggtgcttttttt

SEQ ID NO: 1401 - DNA, 128 bp, synthetic construct
  misc_feature 1..128: note = Description of Artificial Sequence: Synthetic polynucleotide
  source 1..128: mol_type = other DNA
agtaataatacgactcactatagggggccactagggacaggatgttttagagctagaaatagcaagttaaaataactggctagtccgttatcaacttgaaaaagtggcaccgagtcggtgcttttttt

SEQ ID NO: 1402 - DNA, 123 bp, synthetic construct
  misc_feature 1..123: note = Description of Artificial Sequence: Synthetic polynucleotide
  source 1..123: mol_type = other DNA
agtaataatacgactcactatagggggccactagggacaggatgttttagagctagaaatagcaagttaaaatgctagtccgttatcaacttgaaaaagtggcaccgagtcggtgcttttttt

SEQ ID NO: 1403 - DNA, 126 bp, synthetic construct
  misc_feature 1..126: note = Description of Artificial Sequence: Synthetic polynucleotide
  source 1..126: mol_type = other DNA
agtaataatacgactcactatagggggccactagggacaggatgttttagagctagaaatagcaagttaaaatggaactagtccgttatcaacttgaaaaagtggcaccgagtcggtgcttttttt

SEQ ID NO: 1404 - DNA, 126 bp, synthetic construct
  misc_feature 1..126: note = Description of Artificial Sequence: Synthetic polynucleotide
  source 1..126: mol_type = other DNA
agtaataatacgactcactatagggggccactagggacaggatgttttagagctagaaatagcaagttaaaatttcgctagtccgttatcaacttgaaaaagtggcaccgagtcggtgcttttttt

SEQ ID NO: 1405 - DNA, 126 bp, synthetic construct
  misc_feature 1..126: note = Description of Artificial Sequence: Synthetic polynucleotide
  source 1..126: mol_type = other DNA
agtaataatacgactcactatagggggccactagggacaggatgttttagagctagaaatagcaagttaaaataagcgaagtccgttatcaacttgaaaaagtggcaccgagtcggtgcttttttt

SEQ ID NO: 1406 - DNA, 126 bp, synthetic construct
  misc_feature 1..126: note = Description of Artificial Sequence: Synthetic polynucleotide
  source 1..126: mol_type = other DNA
agtaataatacgactcactatagggggccactagggacaggatgttttagagctagaaatagcaagttaaaataaggcttcaccgttatcaacttgaaaaagtggcaccgagtcggtgcttttttt

SEQ ID NO: 1407 - DNA, 126 bp, synthetic construct
  misc_feature 1..126: note = Description of Artificial Sequence: Synthetic polynucleotide
  source 1..126: mol_type = other DNA
agtaataatacgactcactatagggggccactagggacaggatgttttagagctagaaatagcaagttaaaataaggctagtggcttatcaacttgaaaaagtggcaccgagtcggtgcttttttt

SEQ ID NO: 1408 - DNA, 126 bp, synthetic construct
  misc_feature 1..126: note = Description of Artificial Sequence: Synthetic polynucleotide
  source 1..126: mol_type = other DNA
agtaataatacgactcactatagggggccactagggacaggatgttttagagctagaaatagcaagttaaaataaggctagtccgaattcaacttgaaaaagtggcaccgagtcggtgcttttttt

SEQ ID NO: 1409 - DNA, 126 bp, synthetic construct
  misc_feature 1..126: note = Description of Artificial Sequence: Synthetic polynucleotide
  source 1..126: mol_type = other DNA
agtaataatacgactcactatagggggccactagggacaggatgttttagagctagaaatagcaagttaaaataaggctagtccgttaagtacttgaaaaagtggcaccgagtcggtgcttttttt

SEQ ID NO: 1410 - DNA, 126 bp, synthetic construct
  misc_feature 1..126: note = Description of Artificial Sequence: Synthetic polynucleotide
  source 1..126: mol_type = other DNA
agtaataatacgactcactatagggggccactagggacaggatgttttagagctagaaatagcaagttaaaataaggctagtccgttatcatgatgaaaaagtggcaccgagtcggtgcttttttt

SEQ ID NO: 1411 - DNA, 146 bp, synthetic construct
  misc_feature 1..146: note = Description of Artificial Sequence: Synthetic polynucleotide
  source 1..146: mol_type = other DNA
agtaataatacgactcactatagggggccactagggacaggatgttttagagctagaaatagcaagttaaaataagaatgatacatcacaaaaaaaaggctttatgccgtaactactacttattttcaaaataagtagtttttttt

SEQ ID NO: 1412 - DNA, 135 bp, synthetic construct
  misc_feature 1..135: note = Description of Artificial Sequence: Synthetic polynucleotide
  source 1..135: mol_type = other DNA
agtaataatacgactcactatagggggccactagggacaggatgttttagagctagaaatagcaagttaaaataaggcttcatgccgaaatcaacaccctgtcattttatggcagggtgttttcgttattttttt

SEQ ID NO: 1413 - DNA, 125 bp, synthetic construct
  misc_feature 1..125: note = Description of Artificial Sequence: Synthetic polynucleotide
  source 1..125: mol_type = other DNA
agtaataatacgactcactatagggggccactagggacaggatgttttagagctagaaatagcaagttaaaataaagagtttgcgggactctgcggggttacaatcccctaaaaccgcttttttt

SEQ ID NO: 1414 - DNA, 141 bp, synthetic construct
  misc_feature 1..141: note = Description of Artificial Sequence: Synthetic polynucleotide
  source 1..141: mol_type = other DNA
agtaataatacgactcactatagggggccactagggacaggatgttttagagctagaaatagcaagttaaaataaggccgtctgaaaagatgtgccgcaacgctctgccccttaaagcttctgctttaaggggcatttttt

SEQ ID NO: 1415 - DNA, 122 bp, synthetic construct
  misc_feature 1..122: note = Description of Artificial Sequence: Synthetic polynucleotide
  source 1..122: mol_type = other DNA
agtaataatacgactcactatagggggccactagggacaggatgttttagagctagaaatagcaagttaaaataaggctagtccgttatcaacttatactgccgtataggcagagatttttt

SEQ ID NO: 1416 - DNA, 155 bp, synthetic construct
  misc_feature 1..155: note = Description of Artificial Sequence: Synthetic polynucleotide
  source 1..155: mol_type = other DNA
agtaataatacgactcactatagggggccactagggacaggatgttttagagctagaaatagcaagttaaaataaggctagtccgttatcaacttatactgccgtataggcagagaaatggactcggaatactgccgtataggcagagatttttt

SEQ ID NO: 1417 - DNA, 143 bp, synthetic construct
  misc_feature 1..143: note = Description of Artificial Sequence: Synthetic polynucleotide
  source 1..143: mol_type = other DNA
agtaataatacgactcactatagggggccactagggacaggatgttttagagctatcactgccgtataggcagtgatagcaagttaaaataaggctagtccgttatcaacttgaaaaagtggcaccgagtcggtgcttttttt

SEQ ID NO: 1418 - DNA, 174 bp, synthetic construct
  misc_feature 1..174: note = Description of Artificial Sequence: Synthetic polynucleotide
  source 1..174: mol_type = other DNA
agtaataatacgactcactatagggggccactagggacaggatgttttagagctatcactgccgtataggcagtgatagcaagttaaaataaggctagtccgttatcaacttgaaaaagtggcaccgagtcggtgctaatggactcgatactgccgtataggcagagatttttt

SEQ ID NO: 1419 - RNA, 123 nt, synthetic construct
  misc_feature 1..123: note = Description of Artificial Sequence: Synthetic polynucleotide
  source 1..123: mol_type = other RNA
ggggccactagggacaggatgttttagagctatgctgttttggaaacaaaacagcatagcaagttaaaataaggctagtccgttatcaacttgaaaaagtggcaccgagtcggtgcttttttt

SEQ ID NO: 1420 - RNA, 103 nt, synthetic construct
  misc_feature 1..103: note = Description of Artificial Sequence: Synthetic polynucleotide
  source 1..103: mol_type = other RNA
ggggccactagggacaggatgaaaaagagctagaaatagcaagtttttttaaggctagtccgttatcaacttgaaaaagtggcaccgagtcggtgcttttttt

SEQ ID NO: 1421 - RNA, 103 nt, synthetic construct
  misc_feature 1..103: note = Description of Artificial Sequence: Synthetic polynucleotide
  source 1..103: mol_type = other RNA
ggggccactagggacaggatgatatagagctagaaatagcaagttatattaaggctagtccgttatcaacttgaaaaagtggcaccgagtcggtgcttttttt

SEQ ID NO: 1422 - RNA, 103 nt, synthetic construct
  misc_feature 1..103: note = Description of Artificial Sequence: Synthetic polynucleotide
  source 1..103: mol_type = other RNA
ggggccactagggacaggatgttttagaggatgaaaatccaagttaaaataaggctagtccgttatcaacttgaaaaagtggcaccgagtcggtgcttttttt

SEQ ID NO: 1423 - RNA, 103 nt, synthetic construct
  misc_feature 1..103: note = Description of Artificial Sequence: Synthetic polynucleotide
  source 1..103: mol_type = other RNA
ggggccactagggacaggatgaaaatgaggatgaaaatccaagtatttttaaggctagtccgttatcaacttgaaaaagtggcaccgagtcggtgcttttttt

SEQ ID NO: 1424 - RNA, 103 nt, synthetic construct
  misc_feature 1..103: note = Description of Artificial Sequence: Synthetic polynucleotide
  source 1..103: mol_type = other RNA
ggggccactagggacaggatgattatgaggatgaaaatccaagtataattaaggctagtccgttatcaacttgaaaaagtggcaccgagtcggtgcttttttt

SEQ ID NO: 1425 - RNA, 103 nt, synthetic construct
  misc_feature 1..103: note = Description of Artificial Sequence: Synthetic polynucleotide
  source 1..103: mol_type = other RNA
ggggccactagggacaggatgtaattgaggatgaaaatccaagtaattataaggctagtccgttatcaacttgaaaaagtggcaccgagtcggtgcttttttt

SEQ ID NO: 1426 - RNA, 103 nt, synthetic construct
  misc_feature 1..103: note = Description of Artificial Sequence: Synthetic polynucleotide
  source 1..103: mol_type = other RNA
ggggccactagggacaggatgaaaatcaagtgatgaaaatcgagatttttaaggctagtccgttatcaacttgaaaaagtggcaccgagtcggtgcttttttt

SEQ ID NO: 1427 - RNA, 103 nt, synthetic construct
  misc_feature 1..103: note = Description of Artificial Sequence: Synthetic polynucleotide
  source 1..103: mol_type = other RNA
ggggccactagggacaggatgaaaatgaaggatgaaaatccagtatttttaaggctagtccgttatcaacttgaaaaagtggcaccgagtcggtgcttttttt

SEQ ID NO: 1428 - RNA, 103 nt, synthetic construct
  misc_feature 1..103: note = Description of Artificial Sequence: Synthetic polynucleotide
  source 1..103: mol_type = other RNA
ggggccactagggacaggatgatttagagctagaaatagcaagttaaattaaggctagtccgttatcaacttgaaaaagtggcaccgagtcggtgcttttttt

SEQ ID NO: 1429 - RNA, 103 nt, synthetic construct
  misc_feature 1..103: note = Description of Artificial Sequence: Synthetic polynucleotide
  source 1..103: mol_type = other RNA
ggggccactagggacaggatgtctcagagctagaaatagcaagttgagataaggctagtccgttatcaacttgaaaaagtggcaccgagtcggtgcttttttt

SEQ ID NO: 1430 - RNA, 103 nt, synthetic construct
  misc_feature 1..103: note = Description of Artificial Sequence: Synthetic polynucleotide
  source 1..103: mol_type = other RNA
ggggccactagggacaggatgtcccagagctagaaatagcaagttgggataaggctagtccgttatcaacttgaaaaagtggcaccgagtcggtgcttttttt

SEQ ID NO: 1431 - RNA, 103 nt, synthetic construct
  misc_feature 1..103: note = Description of Artificial Sequence: Synthetic polynucleotide
  source 1..103: mol_type = other RNA
ggggccactagggacaggatgttttagactcagaaatcagaagttaaaataaggctagtccgttatcaacttgaaaaagtggcaccgagtcggtgcttttttt

SEQ ID NO: 1432 - RNA, 101 nt, synthetic construct
  misc_feature 1..101: note = Description of Artificial Sequence: Synthetic polynucleotide
  source 1..101: mol_type = other RNA
ggggccactagggacaggatgttttagagctagaaatagctctaaaataaggctagtccgttatcaacttgaaaaagtggcaccgagtcggtgcttttttt

SEQ ID NO: 1433 - RNA, 95 nt, synthetic construct
  misc_feature 1..95: note = Description of Artificial Sequence: Synthetic oligonucleotide
  source 1..95: mol_type = other RNA
ggggccactagggacaggatgttttagaggaaactctaaaataaggctagtccgttatcaacttgaaaaagtggcaccgagtcggtgcttttttt

SEQ ID NO: 1434 - RNA, 89 nt, synthetic construct
  misc_feature 1..89: note = Description of Artificial Sequence: Synthetic oligonucleotide
  source 1..89: mol_type = other RNA
ggggccactagggacaggatgttttagaaataaaataaggctagtccgttatcaacttgaaaaagtggcaccgagtcggtgcttttttt

SEQ ID NO: 1435 - RNA, 103 nt, synthetic construct
  misc_feature 1..103: note = Description of Artificial Sequence: Synthetic polynucleotide
  source 1..103: mol_type = other RNA
ggggccactagggacaggatattttagagctagaaatagcaagttaaaataaggctagtccgttatcaacttgaaaaagtggcaccgagtcggtgcttttttt

SEQ ID NO: 1436 - RNA, 103 nt, synthetic construct
  misc_feature 1..103: note = Description of Artificial Sequence: Synthetic polynucleotide
  source 1..103: mol_type = other RNA
ggggccactagggacaggatattttagagctagaaatagcaagttaaaacaaggctagtccgttatcaacttgaaaaagtggcaccgagtcggtgcttttttt

SEQ ID NO: 1437 - RNA, 103 nt, synthetic construct
  misc_feature 1..103: note = Description of Artificial Sequence: Synthetic polynucleotide
  source 1..103: mol_type = other RNA
ggggccactagggacaggatgacgatagaacggaaacgttggacatcgttaaggctagtccgttatcaacttgaaaaagtggcaccgagtcggtgcttttttt

SEQ ID NO: 1438 - RNA, 103 nt, synthetic construct
  misc_feature 1..103: note = Description of Artificial Sequence: Synthetic polynucleotide
  source 1..103: mol_type = other RNA
ggggccactagggacaggatgacgatgagacggaaacgtcaagtatcgttaaggctagtccgttatcaacttgaaaaagtggcaccgagtcggtgcttttttt

SEQ ID NO: 1439 - RNA, 103 nt, synthetic construct
  misc_feature 1..103: note = Description of Artificial Sequence: Synthetic polynucleotide
  source 1..103: mol_type = other RNA
ggggccactagggacaggatgttttaagactagaaatagtggactaaaataaggctagtccgttatcaacttgaaaaagtggcaccgagtcggtgcttttttt

SEQ ID NO: 1440 - RNA, 103 nt, synthetic construct
  misc_feature 1..103: note = Description of Artificial Sequence: Synthetic polynucleotide
  source 1..103: mol_type = other RNA
ggggccactagggacaggatcgtttagagctagaaatagcaagttaaaataaggctagtccgttatcaacttgaaaaagtggcaccgagtcggtgcttttttt

SEQ ID NO: 1441 - RNA, 103 nt, synthetic construct
  misc_feature 1..103: note = Description of Artificial Sequence: Synthetic polynucleotide
  source 1..103: mol_type = other RNA
ggggccactagggacaggatgtggtagagctagaaatagcaagttaaaataaggctagtccgttatcaacttgaaaaagtggcaccgagtcggtgcttttttt

SEQ ID NO: 1442 - RNA, 103 nt, synthetic construct
  misc_feature 1..103: note = Description of Artificial Sequence: Synthetic polynucleotide
  source 1..103: mol_type = other RNA
ggggccactagggacaggatgtttgcgagctagaaatagcaagttaaaataaggctagtccgttatcaacttgaaaaagtggcaccgagtcggtgcttttttt

SEQ ID NO: 1443 - RNA, 103 nt, synthetic construct
  misc_feature 1..103: note = Description of Artificial Sequence: Synthetic polynucleotide
  source 1..103: mol_type = other RNA
ggggccactagggacaggatgttttagagtgagaaatagcaagttcacataaggctagtccgttatcaacttgaaaaagtggcaccgagtcggtgcttttttt

SEQ ID NO: 1444 - RNA, 103 nt, synthetic construct
  misc_feature 1..103: note = Description of Artificial Sequence: Synthetic polynucleotide
  source 1..103: mol_type = other RNA
ggggccactagggacaggatgttttagagctagaaatagcaagttacactaaggctagtccgttatcaacttgaaaaagtggcaccgagtcggtgcttttttt

SEQ ID NO: 1445 - RNA, 103 nt, synthetic construct
  misc_feature 1..103: note = Description of Artificial Sequence: Synthetic polynucleotide
  source 1..103: mol_type = other RNA
ggggccactagggacaggatgttttagagctagaaatagcaagttaacagaaggctagtccgttatcaacttgaaaaagtggcaccgagtcggtgcttttttt

SEQ ID NO: 1446 - RNA, 105 nt, synthetic construct
  misc_feature 1..105: note = Description of Artificial Sequence: Synthetic polynucleotide
  source 1..105: mol_type = other RNA
ggggccactagggacaggatgttttagagctagaaatagcaagttaaaataactggctagtccgttatcaacttgaaaaagtggcaccgagtcggtgcttttttt

SEQ ID NO: 1447 - RNA, 100 nt, synthetic construct
  misc_feature 1..100: note = Description of Artificial Sequence: Synthetic polynucleotide
  source 1..100: mol_type = other RNA
ggggccactagggacaggatgttttagagctagaaatagcaagttaaaatgctagtccgttatcaacttgaaaaagtggcaccgagtcggtgcttttttt

SEQ ID NO: 1448 - RNA, 103 nt, synthetic construct
  misc_feature 1..103: note = Description of Artificial Sequence: Synthetic polynucleotide
  source 1..103: mol_type = other RNA
ggggccactagggacaggatgttttagagctagaaatagcaagttaaaatggaactagtccgttatcaacttgaaaaagtggcaccgagtcggtgcttttttt

SEQ ID NO: 1449 - RNA, 103 nt, synthetic construct
  misc_feature 1..103: note = Description of Artificial Sequence: Synthetic polynucleotide
  source 1..103: mol_type = other RNA
ggggccactagggacaggatgttttagagctagaaatagcaagttaaaatttcgctagtccgttatcaacttgaaaaagtggcaccgagtcggtgcttttttt

SEQ ID NO: 1450 - RNA, 103 nt, synthetic construct
  misc_feature 1..103: note = Description of Artificial Sequence: Synthetic polynucleotide
  source 1..103: mol_type = other RNA
ggggccactagggacaggatgttttagagctagaaatagcaagttaaaataagcgaagtccgttatcaacttgaaaaagtggcaccgagtcggtgcttttttt

SEQ ID NO: 1451 - RNA, 103 nt, synthetic construct
  misc_feature 1..103: note = Description of Artificial Sequence: Synthetic polynucleotide
  source 1..103: mol_type = other RNA
ggggccactagggacaggatgttttagagctagaaatagcaagttaaaataaggcttcaccgttatcaacttgaaaaagtggcaccgagtcggtgcttttttt

SEQ ID NO: 1452 - RNA, 103 nt, synthetic construct
  misc_feature 1..103: note = Description of Artificial Sequence: Synthetic polynucleotide
  source 1..103: mol_type = other RNA
ggggccactagggacaggatgttttagagctagaaatagcaagttaaaataaggctagtggcttatcaacttgaaaaagtggcaccgagtcggtgcttttttt

SEQ ID NO: 1453 - RNA, 103 nt, synthetic construct
  misc_feature 1..103: note = Description of Artificial Sequence: Synthetic polynucleotide
  source 1..103: mol_type = other RNA
ggggccactagggacaggatgttttagagctagaaatagcaagttaaaataaggctagtccgaattcaacttgaaaaagtggcaccgagtcggtgcttttttt

SEQ ID NO: 1454 - RNA, 103 nt, synthetic construct
  misc_feature 1..103: note = Description of Artificial Sequence: Synthetic polynucleotide
  source 1..103: mol_type = other RNA
ggggccactagggacaggatgttttagagctagaaatagcaagttaaaataaggctagtccgttaagtacttgaaaaagtggcaccgagtcggtgcttttttt

SEQ ID NO: 1455 - RNA, 103 nt, synthetic construct
  misc_feature 1..103: note = Description of Artificial Sequence: Synthetic polynucleotide
  source 1..103: mol_type = other RNA
ggggccactagggacaggatgttttagagctagaaatagcaagttaaaataaggctagtccgttatcatgatgaaaaagtggcaccgagtcggtgcttttttt

SEQ ID NO: 1456 - RNA, 123 nt, synthetic construct
  misc_feature 1..123: note = Description of Artificial Sequence: Synthetic polynucleotide
  source 1..123: mol_type = other RNA
ggggccactagggacaggatgttttagagctagaaatagcaagttaaaataagaatgatacatcacaaaaaaaaggctttatgccgtaactactacttattttcaaaataagtagtttttttt

SEQ ID NO: 1457 - RNA, 112 nt, synthetic construct
  misc_feature 1..112: note = Description of Artificial Sequence: Synthetic polynucleotide
  source 1..112: mol_type = other RNA
ggggccactagggacaggatgttttagagctagaaatagcaagttaaaataaggcttcatgccgaaatcaacaccctgtcattttatggcagggtgttttcgttattttttt

SEQ ID NO: 1458 - RNA, 102 nt, synthetic construct
  misc_feature 1..102: note = Description of Artificial Sequence: Synthetic polynucleotide
  source 1..102: mol_type = other RNA
ggggccactagggacaggatgttttagagctagaaatagcaagttaaaataaagagtttgcgggactctgcggggttacaatcccctaaaaccgcttttttt

SEQ ID NO: 1459 - RNA, 118 nt, synthetic construct
  misc_feature 1..118: note = Description of Artificial Sequence: Synthetic polynucleotide
  source 1..118: mol_type = other RNA
ggggccactagggacaggatgttttagagctagaaatagcaagttaaaataaggccgtctgaaaagatgtgccgcaacgctctgccccttaaagcttctgctttaaggggcatttttt

SEQ ID NO: 1460 - RNA, 99 nt, synthetic construct
  misc_feature 1..99: note = Description of Artificial Sequence: Synthetic oligonucleotide
  source 1..99: mol_type = other RNA
ggggccactagggacaggatgttttagagctagaaatagcaagttaaaataaggctagtccgttatcaacttatactgccgtataggcagagatttttt

SEQ ID NO: 1461 - RNA, 132 nt, synthetic construct
  misc_feature 1..132: note = Description of Artificial Sequence: Synthetic polynucleotide
  source 1..132: mol_type = other RNA
ggggccactagggacaggatgttttagagctagaaatagcaagttaaaataaggctagtccgttatcaacttatactgccgtataggcagagaaatggactcggaatactgccgtataggcagagatttttt

SEQ ID NO: 1462 - RNA, 120 nt, synthetic construct
  misc_feature 1..120: note = Description of Artificial Sequence: Synthetic polynucleotide
  source 1..120: mol_type = other RNA
ggggccactagggacaggatgttttagagctatcactgccgtataggcagtgatagcaagttaaaataaggctagtccgttatcaacttgaaaaagtggcaccgagtcggtgcttttttt

SEQ ID NO: 1463 - RNA, 151 nt, synthetic construct
  misc_feature 1..151: note = Description of Artificial Sequence: Synthetic polynucleotide
  source 1..151: mol_type = other RNA
ggggccactagggacaggatgttttagagctatcactgccgtataggcagtgatagcaagttaaaataaggctagtccgttatcaacttgaaaaagtggcaccgagtcggtgctaatggactcgatactgccgtataggcagagatttttt

SEQ ID NO: 1464 - DNA, 20 bp, synthetic construct
  misc_feature 1..20: note = Description of Artificial Sequence: Synthetic oligonucleotide
  source 1..20: mol_type = other DNA
ggggccactagggacaggat

SEQ ID NO: 1465 - DNA, 80 bp, synthetic construct
  misc_feature 1..80: note = Description of Artificial Sequence: Synthetic oligonucleotide
  source 1..80: mol_type = other DNA
gttttagagctagaaatagcaagttaaaataactcggctagtccgttatcaacttgaaaaagtggcaccgagtcggtgct

SEQ ID NO: 1466 - DNA, 81 bp, synthetic construct
  misc_feature 1..81: note = Description of Artificial Sequence: Synthetic oligonucleotide
  source 1..81: mol_type = other DNA
gttttagagctagaaatagcaagttaaaataactctggctagtccgttatcaacttgaaaaagtggcaccgagtcggtgct

SEQ ID NO: 1467 - DNA, 83 bp, synthetic construct
  misc_feature 1..83: note = Description of Artificial Sequence: Synthetic oligonucleotide
  source 1..83: mol_type = other DNA
gttttagagctagaaatagcaagttaaaataactctctggctagtccgttatcaacttgaaaaagtggcaccgagtcggtgct

SEQ ID NO: 1468 - DNA, 77 bp, synthetic construct
  misc_feature 1..77: note = Description of Artificial Sequence: Synthetic oligonucleotide
  source 1..77: mol_type = other DNA
gttttagagctagaaatagcaagttaaaataaggctagtccgttatcaacttgaaaaagtggcaccgagtcggtgct

SEQ ID NO: 1469 - DNA, 71 bp, synthetic construct
  misc_feature 1..71: note = Description of Artificial Sequence: Synthetic oligonucleotide
  source 1..71: mol_type = other DNA
gttttagaggaaacaagttaaaataaggctagtccgttatcaacttgaaaaagtggcaccgagtcggtgct

SEQ ID NO: 1470 - DNA, 68 bp, synthetic construct
  misc_feature 1..68: note = Description of Artificial Sequence: Synthetic oligonucleotide
  source 1..68: mol_type = other DNA
gttttagagacaagttaaaataaggctagtccgttatcaacttgaaaaagtggcaccgagtcggtgct

SEQ ID NO: 1471 - DNA, 69 bp, synthetic construct
  misc_feature 1..69: note = Description of Artificial Sequence: Synthetic oligonucleotide
  source 1..69: mol_type = other DNA
gttttaggagaaactttaaaataaggctagtccgttatcaacttgaaaaagtggcaccgagtcggtgct

SEQ ID NO: 1472 - DNA, 67 bp, synthetic construct
  misc_feature 1..67: note = Description of Artificial Sequence: Synthetic oligonucleotide
  source 1..67: mol_type = other DNA
gttttatcgaaatctaaaataaggctagtccgttatcaacttgaaaaagtggcaccgagtcggtgct

SEQ ID NO: 1473 - DNA, 65 bp, synthetic construct
  misc_feature 1..65: note = Description of Artificial Sequence: Synthetic oligonucleotide
  source 1..65: mol_type = other DNA
gttttacttcggtaaaataaggctagtccgttatcaacttgaaaaagtggcaccgagtcggtgct

SEQ ID NO: 1474 - DNA, 65 bp, synthetic construct
  misc_feature 1..65: note = Description of Artificial Sequence: Synthetic oligonucleotide
  source 1..65: mol_type = other DNA
gttttagatacttaaaataaggctagtccgttatcaacttgaaaaagtggcaccgagtcggtgct

SEQ ID NO: 1475 - DNA, 65 bp, synthetic construct
  misc_feature 1..65: note = Description of Artificial Sequence: Synthetic oligonucleotide
  source 1..65: mol_type = other DNA
gttttatgaaactaaaataaggctagtccgttatcaacttgaaaaagtggcaccgagtcggtgct

SEQ ID NO: 1476 - DNA, 61 bp, synthetic construct
  misc_feature 1..61: note = Description of Artificial Sequence: Synthetic oligonucleotide
  source 1..61: mol_type = other DNA
gtttcttcggaaataaggctagtccgttatcaacttgaaaaagtggcaccgagtcggtgct

SEQ ID NO: 1477 - DNA, 76 bp, synthetic construct
  misc_feature 1..76: note = Description of Artificial Sequence: Synthetic oligonucleotide
  source 1..76: mol_type = other DNA
gttttaggctagaaatagcaagttaaaataaggctagtccgttatcaacttgaaaaagtggcaccgagtcggtgct

SEQ ID NO: 1478 - DNA, 75 bp, synthetic construct
  misc_feature 1..75: note = Description of Artificial Sequence: Synthetic oligonucleotide
  source 1..75: mol_type = other DNA
gttttagctagaaatagcaagttaaaataaggctagtccgttatcaacttgaaaaagtggcaccgagtcggtgct

SEQ ID NO: 1479 - DNA, 74 bp, synthetic construct
  misc_feature 1..74: note = Description of Artificial Sequence: Synthetic oligonucleotide
  source 1..74: mol_type = other DNA
gttttactagaaatagcaagttaaaataaggctagtccgttatcaacttgaaaaagtggcaccgagtcggtgct

SEQ ID NO: 1480 - DNA, 76 bp, synthetic construct
  misc_feature 1..76: note = Description of Artificial Sequence: Synthetic oligonucleotide
  source 1..76: mol_type = other DNA
gttttagagctagaaatagcagttaaaataaggctagtccgttatcaacttgaaaaagtggcaccgagtcggtgct

SEQ ID NO: 1481 - DNA, 75 bp, synthetic construct
  misc_feature 1..75: note = Description of Artificial Sequence: Synthetic oligonucleotide
  source 1..75: mol_type = other DNA
gttttagagctagaaatagagttaaaataaggctagtccgttatcaacttgaaaaagtggcaccgagtcggtgct

SEQ ID NO: 1482 - DNA, 74 bp, synthetic construct
  misc_feature 1..74: note = Description of Artificial Sequence: Synthetic oligonucleotide
  source 1..74: mol_type = other DNA
gttttagagctagaaataagttaaaataaggctagtccgttatcaacttgaaaaagtggcaccgagtcggtgct

SEQ ID NO: 1483 - DNA, 73 bp, synthetic construct
  misc_feature 1..73: note = Description of Artificial Sequence: Synthetic oligonucleotide
  source 1..73: mol_type = other DNA
gttttagagctagaaatagttaaaataaggctagtccgttatcaacttgaaaaagtggcaccgagtcggtgct

SEQ ID NO: 1484 - DNA, 77 bp, synthetic construct
  misc_feature 1..77: note = Description of Artificial Sequence: Synthetic oligonucleotide
  source 1..77: mol_type = other DNA
gttttagagctagaaatagcaagttaaaataaccctagtccgttatcaacttgaaaaagtggcaccgagtcggtgct

SEQ ID NO: 1485 - DNA, 77 bp, synthetic construct
  misc_feature 1..77: note = Description of Artificial Sequence: Synthetic oligonucleotide
  source 1..77: mol_type = other DNA
gttttagagctagaaatagcaagttaaaataaccctagtgggttatcaacttgaaaaagtggcaccgagtcggtgct

SEQ ID NO: 1486 - DNA, 77 bp, synthetic construct
  misc_feature 1..77: note = Description of Artificial Sequence: Synthetic oligonucleotide
  source 1..77: mol_type = other DNA
gttttagagctagaaatagcaagttaaaataaggctagtgggttatcaacttgaaaaagtggcaccgagtcggtgct

SEQ ID NO: 1487 - DNA, 77 bp, synthetic construct
  misc_feature 1..77: note = Description of Artificial Sequence: Synthetic oligonucleotide
  source 1..77: mol_type = other DNA
gttttagagctagaaatagcaagttaaaataaggctagtaagttatcaacttgaaaaagtggcaccgagtcggtgct

SEQ ID NO: 1488 - DNA, 77 bp, synthetic construct
  misc_feature 1..77: note = Description of Artificial Sequence: Synthetic oligonucleotide
  source 1..77: mol_type = other DNA
gttttagagctagaaatagcaagttaaaataaggctagtttgttatcaacttgaaaaagtggcaccgagtcggtgct

SEQ ID NO: 1489 - DNA, 77 bp, synthetic construct
  misc_feature 1..77: note = Description of Artificial Sequence: Synthetic oligonucleotide
  source 1..77: mol_type = other DNA
gttttagagctagaaatagcaagttaaaataagactagttcgttatcaacttgaaaaagtggcaccgagtcggtgct

SEQ ID NO: 1490 - DNA, 55 bp, synthetic construct
  misc_feature 1..55: note = Description of Artificial Sequence: Synthetic oligonucleotide
  source 1..55: mol_type = other DNA
gttttagagctagaaatagcaagttaaaataaggctaggaaactagccttctcaa

SEQ ID NO: 1491 - DNA, 55 bp, synthetic construct
  misc_feature 1..55: note = Description of Artificial Sequence: Synthetic oligonucleotide
  source 1..55: mol_type = other DNA
gttttagagctagaaatagcaagttaaaataaggctaggaaactagccctcaata

SEQ ID NO: 1492 - DNA, 53 bp, synthetic construct
  misc_feature 1..53: note = Description of Artificial Sequence: Synthetic oligonucleotide
  source 1..53: mol_type = other DNA
gttttagagctagaaatagcaagttaaaataaggctagtccgtagaaaatgcc

SEQ ID NO: 1493 - DNA, 53 bp, synthetic construct
  misc_feature 1..53: note = Description of Artificial Sequence: Synthetic oligonucleotide
  source 1..53: mol_type = other DNA
gttttagagctagaaatagcaagttaaaataaggctagtccgtagaaatacgg

SEQ ID NO: 1494 - DNA, 55 bp, synthetic construct
  misc_feature 1..55: note = Description of Artificial Sequence: Synthetic oligonucleotide
  source 1..55: mol_type = other DNA
gttttagagctagaaatagcaagttaaaataaggctagtccgtagaaatacttat

SEQ ID NO: 1495 - DNA, 59 bp, synthetic construct
  misc_feature 1..59: note = Description of Artificial Sequence: Synthetic oligonucleotide
  source 1..59: mol_type = other DNA
gttttagagctagaaatagcaagttaaaataaggctagtccgttattattagggggtta

SEQ ID NO: 1496 - DNA, 34 bp, synthetic construct
  misc_feature 1..34: note = Description of Artificial Sequence: Synthetic oligonucleotide
  source 1..34: mol_type = other DNA
gttttagagctagaaatagcaagttaaaataagg

SEQ ID NO: 1497 - DNA, 38 bp, synthetic construct
  misc_feature 1..38: note = Description of Artificial Sequence: Synthetic oligonucleotide
  source 1..38: mol_type = other DNA
gttttagagctagaaatagcaagttaaaataaggctag

SEQ ID NO: 1498 - DNA, 42 bp, synthetic construct
  misc_feature 1..42: note = Description of Artificial Sequence: Synthetic oligonucleotide
  source 1..42: mol_type = other DNA
gttttagagctagaaatagcaagttaaaataaggctagtccg

SEQ ID NO: 1499 - DNA, 46 bp, synthetic construct
  misc_feature 1..46: note = Description of Artificial Sequence: Synthetic oligonucleotide
  source 1..46: mol_type = other DNA
gttttagagctagaaatagcaagttaaaataaggctagtccgttat

SEQ ID NO: 1500 - DNA, 79 bp, synthetic construct
  misc_feature 1..79: note = Description of Artificial Sequence: Synthetic oligonucleotide
  source 1..79: mol_type = other DNA
gttttagagctagaaatagcaagttaaaataagggctagtcccgttatcaacttgaaaaagtggcaccgagtcggtgct

SEQ ID NO: 1501 - DNA, 81 bp, synthetic construct
  misc_feature 1..81: note = Description of Artificial Sequence: Synthetic oligonucleotide
  source 1..81: mol_type = other DNA
gttttagagctagaaatagcaagttaaaataaggggctagtccccgttatcaacttgaaaaagtggcaccgagtcggtgct

SEQ ID NO: 1502 - DNA, 83 bp, synthetic construct
  misc_feature 1..83: note = Description of Artificial Sequence: Synthetic oligonucleotide
  source 1..83: mol_type = other DNA
gttttagagctagaaatagcaagttaaaataagggggctagtcccccgttatcaacttgaaaaagtggcaccgagtcggtgct

SEQ ID NO: 1503 - DNA, 77 bp, synthetic construct
  misc_feature 1..77: note = Description of Artificial Sequence: Synthetic oligonucleotide
  source 1..77: mol_type = other DNA
gttttagagctagaaatagcaagttaaaataaaactagtttgttatcaacttgaaaaagtggcaccgagtcggtgct

SEQ ID NO: 1504 - DNA, 79 bp, synthetic construct
  misc_feature 1..79: note = Description of Artificial Sequence: Synthetic oligonucleotide
  source 1..79: mol_type = other DNA
gttttagagctagaaatagcaagttaaaataaggactagttccgttatcaacttgaaaaagtggcaccgagtcggtgct

SEQ ID NO: 1505 - DNA, 78 bp, synthetic construct
  misc_feature 1..78: note = Description of Artificial Sequence: Synthetic oligonucleotide
  source 1..78: mol_type = other DNA
gttttagagctagaaatagcaagttaaaataaggctagtcctgttatcaacttgaaaaagtggcaccgagtcggtgct

SEQ ID NO: 1506 - DNA, 77 bp, synthetic construct
  misc_feature 1..77: note = Description of Artificial Sequence: Synthetic oligonucleotide
  source 1..77: mol_type = other DNA
gttttagagctagaaatagcaagttaaaataaagctagtctgttatcaacttgaaaaagtggcaccgagtcggtgct

SEQ ID NO: 1507 - DNA, 79 bp, synthetic construct
  misc_feature 1..79: note = Description of Artificial Sequence: Synthetic oligonucleotide
  source 1..79: mol_type = other DNA
gttttagagctagaaatagcaagttaaaataaggtctagtcccgttatcaacttgaaaaagtggcaccgagtcggtgct

SEQ ID NO: 1508 - DNA, 81 bp, synthetic construct
  misc_feature 1..81: note = Description of Artificial Sequence: Synthetic oligonucleotide
  source 1..81: mol_type = other DNA
gttttagagctagaaatagcaagttaaaataaggtactagtcgccgttatcaacttgaaaaagtggcaccgagtcggtgct

SEQ ID NO: 1509 - DNA, 83 bp, synthetic construct
  misc_feature 1..83: note = Description of Artificial Sequence: Synthetic oligonucleotide
  source 1..83: mol_type = other DNA
gttttagagctagaaatagcaagttaaaataaggtatctagtgcgccgttatcaacttgaaaaagtggcaccgagtcggtgct

SEQ ID NO: 1510 - DNA, 94 bp, synthetic construct
  misc_feature 1..94: note = Description of Artificial Sequence: Synthetic oligonucleotide
  source 1..94: mol_type = other DNA
gttttagagctagaaatagcaagttaaaatcaaacaaagcttcagctgagtttcaatttctggcccatgttgggcacatacatatgccaccgag

SEQ ID NO: 1511 - DNA, 97 bp, synthetic construct
  misc_feature 1..97: note = Description of Artificial Sequence: Synthetic oligonucleotide
  source 1..97: mol_type = other DNA
gttttagagctagaaatagcaagttaaaataaggcagtgatttttaatccagtccgtacacaacttgaaaaagtgcgcaccgattcggtgctttttt

SEQ ID NO: 1512 - DNA, 84 bp, synthetic construct
  misc_feature 1..84: note = Description of Artificial Sequence: Synthetic oligonucleotide
  source 1..84: mol_type = other DNA
gttttagagctagaaatagcaagttaaaataaggcttagaccgtactcaacttgaaaaggtggcaccgattcggtgtttttttt

SEQ ID NO: 1513 - DNA, 60 bp, synthetic construct
  misc_feature 1..60: note = Description of Artificial Sequence: Synthetic oligonucleotide
  source 1..60: mol_type = other DNA
gttttagagctagaaatagcaagttaaaatcaaagcgctttgcgcggagtttcaactttt

SEQ ID NO: 1514 - DNA, 77 bp, synthetic construct
  misc_feature 1..77: note = Description of Artificial Sequence: Synthetic oligonucleotide
  source 1..77: mol_type = other DNA
gagaatctcctagaaatagctcttattcttaagggatcaccgaatacaacttgaaaaagtggcaccgagtcggtgct

SEQ ID NO: 1515 - DNA, 77 bp, synthetic construct
  misc_feature 1..77: note = Description of Artificial Sequence: Synthetic oligonucleotide
  source 1..77: mol_type = other DNA
gacgatgagacggaaacgtcaagtatcgttaagggatcaccgaatacaacttgaaaaagtggcaccgagtcggtgct

SEQ ID NO: 1516 - DNA, 77 bp, synthetic construct
  misc_feature 1..77: note = Description of Artificial Sequence: Synthetic oligonucleotide
  source 1..77: mol_type = other DNA
aacgatgagacggaaacgtcaagtatcgtcaagggatcacccaatacaacttgaaaaagtggcaccgagtcggtgct

SEQ ID NO: 1517 - DNA, 50 bp, synthetic construct
  misc_feature 1..50: note = Description of Artificial Sequence: Synthetic oligonucleotide
  source 1..50: mol_type = other DNA
aacggtgaggtggaaacaccaagtaccgtcaaggtagcacccgacaagtc

SEQ ID NO: 1518 - RNA, 42 nt, synthetic construct
  misc_feature 1..42: note = Description of Artificial Sequence: Synthetic oligonucleotide
  source 1..42: mol_type = other RNA
gttttagagctagaaatagcaagttaaaataaggctagtccg

SEQ ID NO: 1519 - RNA, 98 nt, synthetic construct
  misc_feature 1..98: note = Description of Artificial Sequence: Synthetic oligonucleotide
  source 1..98: mol_type = other RNA
gttttagagctatgctgttttggaaacaaaacagcatagcaagttaaaataaggctagtccgttatcaacttgaaaaagtggcaccgagtcggtgcca

SEQ ID NO: 1520 - RNA, 78 nt, synthetic construct
  misc_feature 1..78: note = Description of Artificial Sequence: Synthetic oligonucleotide
  source 1..78: mol_type = other RNA
gaaaaagagctagaaatagcaagtttttttaaggctagtccgttatcaacttgaaaaagtggcaccgagtcggtgcca

SEQ ID NO: 1521 - RNA, 78 nt, synthetic construct
  misc_feature 1..78: note = Description of Artificial Sequence: Synthetic oligonucleotide
  source 1..78: mol_type = other RNA
gatatagagctagaaatagcaagttatattaaggctagtccgttatcaacttgaaaaagtggcaccgagtcggtgcca

SEQ ID NO: 1522 - RNA, 78 nt, synthetic construct
  misc_feature 1..78: note = Description of Artificial Sequence: Synthetic oligonucleotide
  source 1..78: mol_type = other RNA
gttttagaggatgaaaatccaagttaaaataaggctagtccgttatcaacttgaaaaagtggcaccgagtcggtgcca

SEQ ID NO: 1523 - RNA, 77 nt, synthetic construct
  misc_feature 1..77: note = Description of Artificial Sequence: Synthetic oligonucleotide
  source 1..77: mol_type = other RNA
gaaaatgaaggatgaaaatccagtatttttaagctagtccgttatcaacttgaaaaagtggcaccgagtcggtgcca

SEQ ID NO: 1524 - RNA, 78 nt, synthetic construct
  misc_feature 1..78: note = Description of Artificial Sequence: Synthetic oligonucleotide
  source 1..78: mol_type = other RNA
gatttagagctagaaatagcaagttaaattaaggctagtccgttatcaacttgaaaaagtggcaccgagtcggtgcca

SEQ ID NO: 1525 - RNA, 78 nt, synthetic construct
  misc_feature 1..78: note = Description of Artificial Sequence: Synthetic oligonucleotide
  source 1..78: mol_type = other RNA
gtctcagagctagaaatagcaagtagagataaggctagtccgttatcaacttgaaaaagtggcaccgagtcggtgcca

SEQ ID NO: 1526 - RNA, 78 nt, synthetic construct
  misc_feature 1..78: note = Description of Artificial Sequence: Synthetic oligonucleotide
  source 1..78: mol_type = other RNA
gaaaatgaggatgaaaatccaagtatttttaaggctagtccgttatcaacttgaaaaagtggcaccgagtcggtgcca

SEQ ID NO: 1527 - RNA, 78 nt, synthetic construct
  misc_feature 1..78: note = Description of Artificial Sequence: Synthetic oligonucleotide
  source 1..78: mol_type = other RNA
gattatgaggatgaaaatccaagtataattaaggctagtccgttatcaacttgaaaaagtggcaccgagtcggtgcca

SEQ ID NO: 1528 - RNA, 78 nt, synthetic construct
  misc_feature 1..78: note = Description of Artificial Sequence: Synthetic oligonucleotide
  source 1..78: mol_type = other RNA
gtaattgaggatgaaaatccaagtaattataaggctagtccgttatcaacttgaaaaagtggcaccgagtcggtgcca

SEQ ID NO: 1529 - RNA, 78 nt, synthetic construct
  misc_feature 1..78: note = Description of Artificial Sequence: Synthetic oligonucleotide
  source 1..78: mol_type = other RNA
gaaaatcaagtgatgaaaatcgagatttttaaggctagtccgttatcaacttgaaaaagtggcaccgagtcggtgcca

SEQ ID NO: 1530 - RNA, 78 nt, synthetic construct
  misc_feature 1..78: note = Description of Artificial Sequence: Synthetic oligonucleotide
  source 1..78: mol_type = other RNA
gtcccagagctagaaatagcaagtagggataaggctagtccgttatcaacttgaaaaagtggcaccgagtcggtgcca

SEQ ID NO: 1531 - RNA, 78 nt, synthetic construct
  misc_feature 1..78: note = Description of Artificial Sequence: Synthetic oligonucleotide
  source 1..78: mol_type = other RNA
gttttagactcagaaatcagaagttaaaataaggctagtccgttatcaacttgaaaaagtggcaccgagtcggtgcca

SEQ ID NO: 1532 - RNA, 78 nt, synthetic construct
  misc_feature 1..78: note = Description of Artificial Sequence: Synthetic oligonucleotide
  source 1..78: mol_type = other RNA
gttttagagctagaaatagcaagttaaaataaggctagtccgttatcaacttgaaaaagtggcaccgagtcggtgcca

SEQ ID NO: 1533 - RNA, 99 nt, synthetic construct
  misc_feature 1..99: note = Description of Artificial Sequence: Synthetic oligonucleotide
  source 1..99: mol_type = other RNA
gttttagagctagaaatagcaagttaaaataaggctagtccgttatcaacttgaaaaagtggcaccgagtcggtgctgttcactgccgtataggcagct

SEQ ID NO: 1534 - RNA, 76 nt, synthetic construct
  misc_feature 1..76: note = Description of Artificial Sequence: Synthetic oligonucleotide
  source 1..76: mol_type = other RNA
gttttagagctagaaatagctctaaaataaggctagtccgttatcaacttgaaaaagtggcaccgagtcggtgcca

SEQ ID NO: 1535 - RNA, 70 nt, synthetic construct
  misc_feature 1..70: note = Description of Artificial Sequence: Synthetic oligonucleotide
  source 1..70: mol_type = other RNA
gttttagaggaaactctaaaataaggctagtccgttatcaacttgaaaaagtggcaccgagtcggtgcca

SEQ ID NO: 1536 - RNA, 64 nt, synthetic construct
  misc_feature 1..64: note = Description of Artificial Sequence: Synthetic oligonucleotide
  source 1..64: mol_type = other RNA
gttttagaaataaaataaggctagtccgttatcaacttgaaaaagtggcaccgagtcggtgcca

SEQ ID NO: 1537 - RNA, 78 nt, synthetic construct
  misc_feature 1..78: note = Description of Artificial Sequence: Synthetic oligonucleotide
  source 1..78: mol_type = other RNA
attttagagctagaaatagcaagttaaaataaggctagtccgttatcaacttgaaaaagtggcaccgagtcggtgcca

SEQ ID NO: 1538 - RNA, 78 nt, synthetic construct
  misc_feature 1..78: note = Description of Artificial Sequence: Synthetic oligonucleotide
  source 1..78: mol_type = other RNA
cgtttagagctagaaatagcaagttaaaataaggctagtccgttatcaacttgaaaaagtggcaccgagtcggtgcca

SEQ ID NO: 1539 - RNA, 78 nt, synthetic construct
  misc_feature 1..78: note = Description of Artificial Sequence: Synthetic oligonucleotide
  source 1..78: mol_type = other RNA
gtggtagagctagaaatagcaagttaaaataaggctagtccgttatcaacttgaaaaagtggcaccgagtcggtgcca

SEQ ID NO: 1540 - RNA, 78 nt, synthetic construct
  misc_feature 1..78: note = Description of Artificial Sequence: Synthetic oligonucleotide
  source 1..78: mol_type = other RNA
gtttgcgagctagaaatagcaagttaaaataaggctagtccgttatcaacttgaaaaagtggcaccgagtcggtgcca

SEQ ID NO: 1541 - RNA, 78 nt, synthetic construct
  misc_feature 1..78: note = Description of Artificial Sequence: Synthetic oligonucleotide
  source 1..78: mol_type = other RNA
gttttagagtgagaaatagcaagttcacataaggctagtccgttatcaacttgaaaaagtggcaccgagtcggtgcca

SEQ ID NO: 1542 - RNA, 78 nt, synthetic construct
  misc_feature 1..78: note = Description of Artificial Sequence: Synthetic oligonucleotide
  source 1..78: mol_type = other RNA
attttagagctagaaatagcaagttaaaacaaggctagtccgttatcaacttgaaaaagtggcaccgagtcggtgcca

SEQ ID NO: 1543 - RNA, 76 nt, synthetic construct
  misc_feature 1..76: note = Description of Artificial Sequence: Synthetic oligonucleotide
  source 1..76: mol_type = other RNA
gacgatagaacggaacgttggacatcgtaaggctagtccgttatcaacttgaaaaagtggcaccgagtcggtgcca

SEQ ID NO: 1544 - RNA, 78 nt, synthetic construct
  misc_feature 1..78: note = Description of Artificial Sequence: Synthetic oligonucleotide
  source 1..78: mol_type = other RNA
gacgatgagacggaaacgtcaagtatcgttaaggctagtccgttatcaacttgaaaaagtggcaccgagtcggtgcca

SEQ ID NO: 1545 - RNA, 78 nt, synthetic construct
  misc_feature 1..78: note = Description of Artificial Sequence: Synthetic oligonucleotide
  source 1..78: mol_type = other RNA
gttttaagactagaaatagtggactaaaataaggctagtccgttatcaacttgaaaaagtggcaccgagtcggtgcca

SEQ ID NO: 1546 - RNA, 78 nt, synthetic construct
  misc_feature 1..78: note = Description of Artificial Sequence: Synthetic oligonucleotide
  source 1..78: mol_type = other RNA
gttttagagctagaaatagcaagttacactaaggctagtccgttatcaacttgaaaaagtggcaccgagtcggtgcca

SEQ ID NO: 1547 - RNA, 78 nt, synthetic construct
  misc_feature 1..78: note = Description of Artificial Sequence: Synthetic oligonucleotide
  source 1..78: mol_type = other RNA
gttttagagctagaaacagcaagttaacagaaggctagtccgttatcaacttgaaaaagtggcaccgagtcggtgcca

SEQ ID NO: 1548 - RNA, 80 nt, synthetic construct
  misc_feature 1..80: note = Description of Artificial Sequence: Synthetic oligonucleotide
  source 1..80: mol_type = other RNA
gttttagagctagaaacagcaagttaaaataactggctagtccgttatcaacttgaaaaagtggcaccgagtcggtgcca

SEQ ID NO: 1549 - RNA, 75 nt, synthetic construct
  misc_feature 1..75: note = Description of Artificial Sequence: Synthetic oligonucleotide
  source 1..75: mol_type = other RNA
gttttagagctagaaacagcaagttaaaatgctagtccgttatcaacttgaaaaagtggcaccgagtcggtgcca

SEQ ID NO: 1550 - RNA, 78 nt, synthetic construct
  misc_feature 1..78: note = Description of Artificial Sequence: Synthetic oligonucleotide
  source 1..78: mol_type = other RNA
gttttagagctagaaatagcaagttaaaatggaactagtccgttatcaacttgaaaaagtggcaccgagtcggtgcca

SEQ ID NO: 1551 - RNA, 78 nt, synthetic construct
  misc_feature 1..78: note = Description of Artificial Sequence: Synthetic oligonucleotide
  source 1..78: mol_type = other RNA
gttttagagctagaaatagcaagttaaaatttcgctagtccgttatcaacttgaaaaagtggcaccgagtcggtgcca

SEQ ID NO: 1552 - RNA, 78 nt, synthetic construct
  misc_feature 1..78: note = Description of Artificial Sequence: Synthetic oligonucleotide
  source 1..78: mol_type = other RNA
gttttagagctagaaatagcaagttaaaataagcgaagtccgttatcaacttgaaaaagtggcaccgagtcggtgcca

SEQ ID NO: 1553 - RNA, 78 nt, synthetic construct
  misc_feature 1..78: note = Description of Artificial Sequence: Synthetic oligonucleotide
  source 1..78: mol_type = other RNA
gttttagagctagaaatagcaagttaaaataaggcttcaccgttatcaacttgaaaaagtggcaccgagtcggtgcca

SEQ ID NO: 1554 - RNA, 101 nt, synthetic construct
  misc_feature 1..101: note = Description of Artificial Sequence: Synthetic polynucleotide
  source 1..101: mol_type = other RNA
gttttagagctagaaatagcaagttaaaataagaatgatacatcacaaaaaaaaggctttatgccgtaactactacttatttcaaataagtagtttttttt

SEQ ID NO: 1555 - RNA, 88 nt, synthetic construct
  misc_feature 1..88: note = Description of Artificial Sequence: Synthetic oligonucleotide
  source 1..88: mol_type = other RNA
gttttagagctagaaatagcaagtttaaataaggcttcatgccgaaatcaacaccctgtcattttatggcagggtgttttcgttattt

SEQ ID NO: 1556 - RNA, 79 nt, synthetic construct
  misc_feature 1..79: note = Description of Artificial Sequence: Synthetic oligonucleotide
  source 1..79: mol_type = other RNA
gttttagagctagaaatagcaagttaaaataaagagtttgcgggactctgcggggttacaatcccctaaaaccgctttt

SEQ ID NO: 1557 - RNA, 78 nt, synthetic construct
  misc_feature 1..78: note = Description of Artificial Sequence: Synthetic oligonucleotide
  source 1..78: mol_type = other RNA
gttttagagctagaaatagcaagttaaaataaggctagtggcttatcaacttgaaaaagtggcaccgagtcggtgcca

SEQ ID NO: 1558 - RNA, 78 nt, synthetic construct
  misc_feature 1..78: note = Description of Artificial Sequence: Synthetic oligonucleotide
  source 1..78: mol_type = other RNA
gttttagagctagaaatagcaagttaaaataaggctagtccgaattcaacttgaaaaagtggcaccgagtcggtgcca

SEQ ID NO: 1559 - RNA, 78 nt, synthetic construct
  misc_feature 1..78: note = Description of Artificial Sequence: Synthetic oligonucleotide
  source 1..78: mol_type = other RNA
gttttagagctagaaatagcaagttaaaataaggctagtccgttaagtacttgaaaaagtggcaccgagtcggtgcca

SEQ ID NO: 1560 - RNA, 78 nt, synthetic construct
  misc_feature 1..78: note = Description of Artificial Sequence: Synthetic oligonucleotide
  source 1..78: mol_type = other RNA
gttttagagctagaaatagcaagttaaaataaggctagtccgttatcatgatgaaaaagtggcaccgagtcggtgcca

SEQ ID NO: 1561 - RNA, 92 nt, synthetic construct
  misc_feature 1..92: note = Description of Artificial Sequence: Synthetic oligonucleotide
  source 1..92: mol_type = other RNA
gttttagagctagaaatagcaagttaaaataaggctcgtctgaaaagatggccgcaacgctctgccccttaaagcttctgctttaaggggca

SEQ ID NO: 1562 - RNA, 73 nt, synthetic construct
  misc_feature 1..73: note = Description of Artificial Sequence: Synthetic oligonucleotide
  source 1..73: mol_type = other RNA
gttttagagctagaaatagcaagttaaaataaggctagtccgttatcaacttatactgccgtataggcagaga

SEQ ID NO: 1563 - RNA, 106 nt, synthetic construct
  misc_feature 1..106: note = Description of Artificial Sequence: Synthetic polynucleotide
  source 1..106: mol_type = other RNA
gttttagagctagaaatagcaagttaaaataaggctagtccgttatcaacttatactgccgtataggcagagaaatggactcggaatactgccgtataggcagaga

SEQ ID NO: 1564 - RNA, 95 nt, synthetic construct
  misc_feature 1..95: note = Description of Artificial Sequence: Synthetic oligonucleotide
  source 1..95: mol_type = other RNA
gttttagagctatcactgccgtataggcagtgatagcaagttaaaataaggctagtccgttatcaacttgaaaaagtggcaccgagtcggtgcca

SEQ ID NO: 1565 - RNA, 128 nt, synthetic construct
  misc_feature 1..128: note = Description of Artificial Sequence: Synthetic polynucleotide
  source 1..128: mol_type = other RNA
gttttagagctatcactgccgtataggcagtgatagcaagttaaaataaggctagtccgttatcaacttgaaaaagtggcaccgagtcggtgccaaatggactcggaatactgccgtataggcagaga

SEQ ID NO: 1566-1567 - skipped (2 entries)

SEQ ID NO: 1568 - protein, 805 aa, synthetic construct
  REGION 1..805: note = Description of Artificial Sequence: Synthetic consensus sequence
EYILGLDIGIASVGWAIVEDDYKVPAAKRLIDGGVRNFTGAELPKTGETAALDRRLARGARRRIRRRKHRLLRLQELFSREGSLTDFDFFSRLENSFLVEEDKRNTIYHLRKAALENKLKPDELYLALLHIIKHRGHFLIEGNDFDTANKETGALLSAVMINRYLEHEADLRTLKELILKKFPKKYKEIFSETFLRNQRGFYNGSIPRQLLLEELEAIFRKQREYYPFIKLLTFRIPYYIGPLAEGKSEFAFVDKPASAENFIEKMTGKCTYLPEEKRAPKHSLLAEKFTVLNELNNVRIIILEQGETKILSKEEKQELLDLLFKKKKLTYKKLRKLLGLSEDAIFKGLRYEGLDNAEKAFNISLKTYHKLRKALGDKDLLDNPKNPKDLDEIVKILTLYKDREMIKKRLELYKDVLNEEQVKKLVRLHFTGWGRLSLKALRGIRPLMEQGKRYDEAILELGGNRNFMQNINDSQLLPKINITKAKDEILNPVVKRALLQARKVVNELVKKYGPPDKIVIEMAREEQGTNFGKRNSKERYKKNEDKIKEFASALGKEILKEEPTENSSKNILKLRLYYQQNGKCMYTGKEIDIDDLFDLSYYEIDHILPQSRSFDDSISNKVLVLASENQEKGDQTPYEAEIVKKDSAFWNKFEAYVLISKRKSDKLTRAERGGLSDDDKAGFIDRNLNDTRYITRVVANYLKDRFNFHLKKRKVKVVTLKGQLTSQLRKKWGLYKKREINNYHHAHDAYINAVSTNALVKKFSQLEPEFRYKEYHNFDGRKKKKSATDKKVKFSNPMEFFKQKV

SEQ ID NO: 1569 - protein, 1045 aa, Streptococcus agalactiae
PYSIGLDIGTNSVGWSIITDDYKVPAKKMRVLGNTDKEYIKKNLIGALLFDGGNTAADRRLKRTARRRYTRRRNRILYLQEIFAEEMSKVDDSFFHRLEDSFLVEEDKRGSKYPIFATLQEEKDYHEKFSTIYHLRKELADKKEKADLRLIYIALAHIIKFRGHFLIEDDSFDVRNTDISKQYQDFLEIFNTTFENNDLLSQNVDVEAILTDKISKSAKKDRILAQYPNQKSTGIFAEFLKLIVGNQADFKKYFNLEDKTPLQFAKDSYDEDLENLLGQIGDEFADLFSAAKKLYDSVLLSGILTVIDLSTKAPLSASMIQRYDEHREDLKQLKQFVKASLPEKYQEIFADSSKDGYAGYIEGKTNQEAFYKYLSKLLTKQEDSENFLEKIKNEDFLRKQRTFDNGSIPHQVHLTELKAIIRRQSEYYPFLKENQDRIEKILTFRIPYYIGPLAREKSDFAWMTRKTDDSIRPWNFEDLVDKEKSAEAFIHRMTNNDFYLPEEKVLPKHSLIYEKFTVYNELTKVRYKNEQGETYFFDSNIKQEIFDGVFKEHRKVSKKKLLDFLAKEYEEFRIVDVIGLDKENKAFNASLGTYHDLEKILDKDFLDNPDNESILEDIVQTLTLFEDREMIKKRLENYKDLFTESQLKKLYRRHYTGWGRLSAKLINGIRDKESQKTILDYLIDDGRSNRNFMQLINDDGLSFKSIISKAQAGSHSDNLKEVVGELAGSPAIKKGILQSLKIVDELVKVMGYEPEQIVVEMARENQTTNQGRRNSRQRYKLLDDGVKNLASDLNGNILKEYPTDNQALQNERLFLYYLQNGRDMYTGEALDIDNLSQYDIDHIIPQAFIKDDSIDNRVLVSSAKNRGKSDDVPSLEIVKDCKVFWKKLLDAKLMSQRKYDNLTKAERGGLTSDDKARFIQRQLVETRQITKHVARILDERFNNELDSKGRRIRKVKIVTLKSNLVSNFRKEFGFYKIREVNNYHHAHDAYLNAVVAKAILTKYPQLEPEFVYGDYPKYNSYKTRKSATEKLFFYSNIMNFFKTKV

SEQ ID NO: 1570 - protein, 781 aa, Wolinella succinogenes
ERILGVDLGISSLGWAIVEYDKDDEAANRIIDCGVRLFTAAETPKKKESPNKARREARGIRRVLNRRRVRMNMIKKLFLRAGLIQDVDLDGEGGMFYSKANRADVWELRHDGLYRLLKGDELARVLIHIAKHRGYKFIGDDEADEESGKVKKAGVVLRQNFEAAGCRTVGEWLWRERGANGKKRNKHGDYEISIHRDLLVEEVEAIFVAQQEMRSTIATDALKAAYREIAFFVRPMQRIEKMVGHCTYFPEERRAPKSAPTAEKFIAISKFFSTVIIDNEGWEQKIIERKTLEELLDFAVSREKVEFRHLRKFLDLSDNEIFKGLHYKGKPKTAKKREATLFDPNEPTELEFDKVEAEKKAWISLRGAAKLREALGNEFYGRFVALGKHADEATKILTYYKDEGQKRRELTKLPLEAEMVERLVKIGFSDFLKLSLKAIRDILPAMESGARYDEAVLMLGVPHKEKSAILPPLNKTDIDILNPTVIRAFAQFRKVANALVRKYGAFDRVHFELAREINTKGEIEDIKESQRKNEKERKEAADWIAETSFQVPLTRKNILKKRLYIQQDGRCAYTGDVIELERLFDEGYCEIDHILPRSRSADDSFANKVLCLARANQQKTDRTPYEWFGHDAARWNAFETRTSAPSNRVRTGKGKIDRLLKKNFDENSEMAFKDRNLNDTRYMARAIKTYCEQYWVFKNSHTKAPVQVRSGKLTSVLRYQWGLESKDRESHTHHAVDAIIIAFSTQGMVQKLSEYYRFKETHREKERPKLAVPLANFRDAV

SEQ ID NO: 1571 - protein, 771 aa, Pasteurella multocida
  REGION 1..771: note = subsp. multocida str. Pm70
SYILGLDLGIASVGWAVVEINENEDPIGLIDVGVRIFERAEVPKTGESLALSRRLARSTRRLIRRRAHRLLLAKRFLKREGILSTIDLEKGLPNQAWELRVAGLERRLSAIEWGAVLLHLIKHRGYLSKRKNESQTNNKELGALLSGVAQNHQLLQSDDYRTPAELALKKFAKEEGHIRNQRGAYTHTFNRLDLLAELNLLFAQQHQFGNPHCKEHIQQYMTELLMWQKPALSGEAILKMLGKCTHEKNEFKAAKHTYSAERFVWLTKLNNLRILEDGAERALNEEERQLLINHPYEKSKLTYAQVRKLLGLSEQAIFKHLRYSKENAESATFMELKAWHAIRKALENQGLKDTWQDLAKKPDLLDEIGTAFSLYKTDEDIQQYLTNKVPNSVINALLVSLNFDKFIELSLKSLRKILPLMEQGKRYDQACREIYGHHYGEANQKTSQLLPAIPAQEIRNPVVLRTLSQARKVINAIIRQYGSPARVHIETGRELGKSFKERREIQKQQEDNRTKRESAVQKFKELFSDFSSEPKSKDILKFRLYEQQHGKCLYSGKEINIHRLNEKGYVEIDHALPFSRTWDDSFNNKVLVLASENQNKGNQTPYEWLQGKINSERWKNFVALVLGSQCSAAKKQRLLTQVIDDNKFIDRNLNDTRYIARFLSNYIQENLLLVGKNKKNVFTPNGQITALLRSRWGLIKARENNNRHHALDAIVVACATPSMQQKITRFIRFKEVHPYKIENRYEMVDQESGEIISPHFPEPWAYFRQEV

SEQ ID NO: 1572 - protein, 1039 aa, Streptococcus mutans
PYSIGLDIGTNSVGWAVVTDDYKVPAKKMKVLGNTDKSHIEKNLLGALLFDSGNTAEDRRLKRTARRRYTRRRNRILYLQEIFSEEMGKVDDSFFHRLEDSFLVTEDKRGERHPIFGNLEEEVKYHENFPTIYHLRQYLADNPEKVDLRLVYLALAHIIKFRGHFLIEGKFDTRNNDVQRLFQEFLAVYDNTFENSSLQEQNVQVEEILTDKISKSAKKDRVLKLFPNEKSNGRFAEFLKLIVGNQADFKKHFELEEKAPLQFSKDTYEEELEVLLAQIGDNYAELFLSAKKLYDSILLSGILTVTDVGTKAPLSASMIQRYNEHQMDLAQLKQFIRQKLSDKYNEVFSDVSKDGYAGYIDGKTNQEAFYKYLKGLLNKIEGSGYFLDKIEREDFLRKQRTFDNGSIPHQIHLQEMRAIIRRQAEFYPFLADNQDRIEKLLTFRIPYYVGPLARGKSDFAWLSRKSADKITPWNFDEIVDKESSAEAFINRMTNYDLYLPNQKVLPKHSLLYEKFTVYNELTKVKYKTEQGKTAFFDANMKQEIFDGVFKVYRKVTKDKLMDFLEKEFDEFRIVDLTGLDKENKVFNASYGTYHDLCKILDKDFLDNSKNEKILEDIVLTLTLFEDREMIRKRLENYSDLLTKEQVKKLERRHYTGWGRLSAELIHGIRNKESRKTILDYLIDDGNSNRNFMQLINDDALSFKEEIAKAQVIGETDNLNQVVSDIAGSPAIKKGILQSLKIVDELVKIMGHQPENIVVEMARENQFTNQGRRNSQQRLKGLTDSIKEFGSQILKEHPVENSQLQNDRLFLYYLQNGRDMYTGEELDIDYLSQYDIDHIIPQAFIKDNSIDNRVLTSSKENRGKSDDVPSKDVVRKMKSYWSKLLSAKLITQRKFDNLTKAERGGLTDDDKAGFIKRQLVETRQITKHVARILDERFNTETDENNKKIRQVKIVTLKSNLVSNFRKEFELYKVREINDYHHAHDAYLNAVIGKALLGVYPQLEPEFVYGDYPHFHGHKENKATAKKFFYSNIMNFFKKDD

SEQ ID NO: 1573 - protein, 1047 aa, Streptococcus pyogenes
KYSIGLDIGTNSVGWAVITDEYKVPSKKFKVLGNTDRHSIKKNLIGALLFDSGETAEATRLKRTARRRYTRRKNRICYLQEIFSNEMAKVDDSFFHRLEESFLVEEDKKHERHPIFGNIVDEVAYHEKYPTIYHLRKKLVDSTDKADLRLIYLALAHMIKFRGHFLIEGDLNPDNSDVDKLFIQLVQTYNQLFEENPINASGVDAKAILSARLSKSRRLENLIAQLPGEKKNGLFGNLIALSLGLTPNFKSNFDLAEDAKLQLSKDTYDDDLDNLLAQIGDQYADLFLAAKNLSDAILLSDILRVNTEITKAPLSASMIKRYDEHHQDLTLLKALVRQQLPEKYKEIFFDQSKNGYAGYIDGGASQEEFYKFIKPILEKMDGTEELLVKLNREDLLRKQRTFDNGSIPHQIHLGELHAILRRQEDFYPFLKDNREKIEKILTFRIPYYVGPLARGNSRFAWMTRKSEETITPWNFEEVVDKGASAQSKIERMTNFDKNLPNEKVLPKHSLLYEYFTVYNELTKVKYVTEGMRKPAFLSGEQKKAIVDLLFKTNRKVTVKQLKEDYFKKIECFDSVEISGVEDRFNASLGTYHDLLKIIKDKDFLDNEENEDILEDIVLTLTLFEDREMIEERLKTYAHLFDDKVMKQLKRRRYTGWGRLSRKLINGIRDKQSGKTILDFLKSDGFANRNFMQLINDDSLTFKEDIQKAQVSGQGDSLHEHIANLAGSPAIKKGILQTVKVVDELVKVMGRHKPENIVIEMARENQTTQKGQKNSRERMKRIEEGIKELGSQILKEHPVENTQLQNEKLYLYYLQNGRDMYVDQELDINRLSDYDVDHIVPQSFLKDDSIDNKVLTRSDKNRGKSDNVPSEEVVKKMKNYWRQLLNAKLITQRKFDNLTKAERGGLSELDKAGFIKRQLVETRQITKHVAQILDSRMNTKYDENDKLIREVKVITLKSKLVSDFRKDFQFYKVREINNYHHAHDAYLNAVVGTALIKKYPKLESEFVYGDYKVYDVRKMIAKSEQEIGKATAKYFFYSNIMNFFKTEI

SEQ ID NO: 1574 - protein, 1066 aa, Treponema denticola
DYFLGLDVGTGSVGWAVTDTDYKLLKANRKDLWGMRCFETAETAEVRRLHRGARRRIERRKKRIKLLQELFSQEIAKTDEGFFQRMKESPFYAEDKTILQENTLFNDKDFADKTYHKAYPTINHLIKAWIENKVKPDPRLLYLACHNIIKKRGHFLFEGDFDSENQFDTSIQALFEYLREDMEVDIDADSQKVKEILKDSSLKNSEKQSRLNKILGLKPSDKQKKAITNLISGNKINFADLYDNPDLKDAEKNSISFSKDDFDALSDDLASILGDSFELLLKAKAVYNCSVLSKVIGDEQYLSFAKVKIYEKHKTDLTKLKNVIKKHFPKDYKKVFGYNKNEKNNNNYSGYVGVCKTKSKKLIINNSVNQEDFYKFLKTILSAKSEIKEVNDILTEIETGTFLPKQISKSNAEIPYQLRKMELEKILSNAEKHFSFLKQKDEKGLSHSEKIIMLLTFKIPYYIGPINDNHKKFFPDRCWVVKKEKSPSGKTTPWNFFDHIDKEKTAEAFITSRTNFCTYLVGESVLPKSSLLYSEYTVLNEINNLQIIIDGKNICDIKLKQKIYEDLFKKYKKITQKQISTFIKHEGICNKTDEVIILGIDKECTSSLKSYIELKNIFGKQVDEISTKNMLEEIIRWATIYDEGEGKTILKTKIKAEYGKYCSDEQIKKILNLKFSGWGRLSRKFLETVTSEMPGFSEPVNIITAMRETQNNLMELLSSEFTFTENIKKINSGFEDAEKQFSYDGLVKPLFLSPSVKKMLWQTLKLVKEISHITQAPPKKIFIEMAKGAELEPARTKTRLKILQDLYNNCKNDADAFSSEIKDLSGKIENEDNLRLRSDKLYLYYTQLGKCMYCGKPIEIGHVFDTSNYDIDHIYPQSKIKDDSISNRVLVCSSCNKNKEDKYPLKSEIQSKQRGFWNFLQRNNFISLEKLNRLTRATPISDDETAKFIARQLVETRQATKVAAKVLEKMFPETKIVYSKAETVSMFRNKFDIVKCREINDFHHAHDAYLNIVVGNVYNTKFTNNPWNFIKEKRDNPKIADTYNYYKVFDYDVKRNNITAWEKGKT

SEQ ID NO: 1575 - protein, 774 aa, Neisseria meningitidis
NYILGLDIGIASVGWAMVEIDEDENPICLIDLGVRVFERAEVPKTGDSLAMARRLARSVRRLTRRRAHRLLRARRLLKREGVLQAADFDENGLIKSLPNTPWQLRAAALDRKLTPLEWSAVLLHLIKHRGYLSQRKNEGETADKELGALLKGVADNAHALQTGDFRTPAELALNKFEKESGHIRNQRGDYSHTFSRKDLQAELILLFEKQKEFGNPHVSGGLKEGIETLLMTQRPALSGDAVQKMLGHCTFEPAEPKAAKNTYTAERFIWLTKLNNLRILEQGSERPLTDTERATLMDEPYRKSKLTYAQARKLLGLEDTAFFKGLRYGKDNAEASTLMEMKAYHAISRALEKEGLKDKKSPLNLSPELQDEIGTAFSLFKTDEDITGRLKDRIQPEILEALLKHISFDKFVQISLKALRRIVPLMEQGKRYDEACAEIYGDHYGKKNTEEKIYLPPIPADEIRNPVVLRALSQARKVINGVVRRYGSPARIHIETAREVGKSFKDRKEIEKRQEENRKDREKAAAKFREYFPNFVGEPKSKDILKLRLYEQQHGKCLYSGKEINLGRLNEKGYVEIDHALPFSRTWDDSFNNKVLVLGSENQNKGNQTPYEYFNGKDNSREWQEFKARVETSRFPRSKKQRILLQKFDEDGFKERNLNDTRYVNRFLCQFVADRMRLTGKGKKRVFASNGQITNLLRGFWGLRKVRAENDRHHALDAVVVACSTVAMQQKITRFVRYKEMNAFDGKTIDKETGEVLHQKTHFPQPWEFFAQEV

SEQ ID NO: 1576 - protein, 786 aa, Streptococcus gordonii
  REGION 1..786: note = str. Challis substr. CH1
GLVLGLDIGIASVGVGILEKDTGKIIHASSRLFPAATADNNVERRSNRQGRRLNRRKKHRSVRLQDLFEGYGLLTDFSKVSMNLNPYQLRVQGMENQLTNEELFVALKNIVKRRGISYLDDASEDGGTVSSDYGKAVEENRKLLAEKTPGQIQLERFEKYGQLRGDFTVEENGEKHRLINVFSTSAYRKEAERILRKQQEFNSKITDEFIEDYLIILTGKRKYYHGPGNEKSRTDYGRFRTDGTTLDNIFGILIGKCTFYTEEYRASKASYTAQEFNLLNDLNNLTVPTETKKLSEEQKKLIIEYAKSAKTLGASTLLKYIAKMIDASVDQIRGYRVDVNNKPEMHTFEVYRKMQSLETIKVEELPRKVLDELAHILTLNTEREGIEEAINSKLKDIFNRDQVLELVQFRKNNSSLFSKGWHNFSIKLMMELIPELYETSEEQMTILTRLGKQRSKETSKRTKYIDEKELTEEIYNPVVAKSVRQAIKIINEATKKYGIFDNIVIEMARENNEEDAKKDYIKRQKANQDEKNAAMEKAAFQYNGKKELPDNIFHGHKELTTKIRLWHQQGEKCLYTGKNIPISDLIHNQYKYEIDHILPLSLSFDDSLSNKVLVLATANQEKGQRTPFQALDSMDDAWSYREFKSYVKDSKLLSNKKKDYLLTEEDISKIEVKQKFIERNLVDTRYSSRVVLNALQDFYKSHQLDTTISVVRGQFTSQLRRKWGIEKSRETYHHHAVDALIIAASSQLRLWKKHSNPLIAYKEGQFVDSETGEIVSLSDEEYKELV

SEQ ID NO: 1577 - protein, 875 aa, Mycoplasma gallisepticum
  REGION 1..875: note = str. R(low)
EVTIGLDLGVGSVGWAIVDNETNIIHHLGSRLFSQAKTAEDRRSFRGVRRLIRRRKYKLKRFVNLIWKYNSYFGFKNKEDILNNYQEQQKLHNTVLNLKLEALNAKIDPKALSWILHDYLKNRGHFYEDNRDFNVYPTEELANYFDEFGYYKGIIDSKNDDDDKLEEGLTKYKFSNQHWLEEVKKVLSNQTGLPEKFKEEYESLFSYVRNYSEGPGSINSVSPYGIYHLDEKEGKVVQKYNNIWDKTIGKCSIFPDEYRAPKNSPIAMIFNEINELSTIRSYSIYLTGWFINQEFKKAYLNKLLDLLIKTNSEKPIDARQFKKLREETIAESIGKETLKDVESEEKLEKDDHKWKLKGLKLNTNGKIQYNDLSSLAKFVHKLKQHLKLDFLLEDQYTPLDKINFLQSLYVYLGKHLRYSNRVDSANLKEFSDSSRLFERVLQEQKDGLFKLFEQTDKDDEKILTQTHSLSTKAMLLAITRMTNLDNDEDNQKNNDKGWNFEAIKNFDQKFIDITKTNNNLSLKQDKRYLDDQFINDAILSPGVKRILREATKVFNAILKQFSEEYDVTKVVIELARELSEEKELENTKNYKKLIKKNGDKISEGLKALGIAEDKIEEILKSPTKSYKVLLWLQQDHIDPYSQKEIAFDDILTKTEKTEIDHIIPYSISFDDSSSNKLLVLAESNQAKSNQTPYEFINSGKAEITWEVYEAYCHKFKNGDSSLLDSTQRSKKFAKMMKTDTSSKYDIGFLARNLNDTRYATIVFRDALKDYANNHLVEDKPMFKVVCINGGVTSFLRKNFDPKSWYAKKDRDKNIHHAVDASIISIFSNETKTLFNQLTKFADYKLFKNTDGSWKKIDPKTGVVSEVTDENWKQIR

SEQ ID NO: 1578 - protein, 765 aa, Campylobacter jejuni
  REGION 1..765: note = subsp. jejuni
ARILAFDIGISSIGWAFSENDELKDCGVRIFTKVENPKTGESLALPRRLARSARKRLARRKARLNHLKHLIANEFKLNYEDYQSFDESLAKAYKGSLISPYELRFRALNELLSKQDFARVILHIAKRRGYDDIKNSDDKEKGAILKAIKQNEEKLANYQSVGEYLYKEYFQKFKENSKEFTNVRNKKESYERCIAQSFLKDELKLIFKKQREFGFSFSKKFEEEVLSVAFYKRALKDFSHLVGNCSFFTDEKRAPKNSPLAFMFVALTRIINLLNNLKNTEGILYTKDDLNALLNEVLKNGTLTYKQTKKLLGLSDDYEFKGEKGTYFIEFKKYKEFIKALGEHNLSQDDLNEIAKDITLIKDEIKLKKALAKYDLNQNQIDSLSKLEFKDHLNISFKALKLVTPLMLEGKKYDEACNELNLKVAINEDKKDFLPAFNETYYKDEVTNPVVLRAIKEYRKVLNALLKKYGKVHKINIELAREVGKNHSQRAKIEKEQNENYKAKKDAELECEKLGLKINSKNILKLRLFKEQKEFCAYSGEKIKISDLQDEKMLEIDHIYPYSRSFDDSYMNKVLVFTKQNQEKLNQTPFEAFGNDSAKWQKIEVLAKNLPTKKQKRILDKNYKDKEQKNFKDRNLNDTRYIARLVLNYTKDYLDFLPLSDDENTKLNDTQKGSKVHVEAKSGMLTSALRHTWGFSAKDRNNHLHHAIDAVIIAYANNSIVKAFSDFKKEQESNSAELYAKKISELDYKNKRKFFEPFSGFRQKV

SEQ ID NO: 1579 - protein, 1042 aa, Listeria innocua
PYTIGLDIGTNSVGWAVLTDQYDLVKRKMKIAGDSEKKQIKKNFWGVRLFDEGQTAADRRMARTARRRIERRRNRISYLQGIFAEEMSKTDANFFCRLSDSFYVDNEKRNSRHPFFATIEEEVEYHKNYPTIYHLREELVNSSEKADLRLVYLALAHIIKYRGNFLIEGALDTQNTSVDGIYKQFIQTYNQVFASGIEDGSLKKLEDNKDVAKILVEKVTRKEKLERILKLYPGEKSAGMFAQFISLIVGSKGNFQKPFDLIEKSDIECAKDSYEEDLESLLALIGDEYAELFVAAKNAYSAVVLSSIITVAETETNAKLSASMIERFDTHEEDLGELKAFIKLHLPKHYEEIFSNTEKHGYAGYIDGKTKQADFYKYMKMTLENIEGADYFIAKIEKENFLRKQRTFDNGAIPHQLHLEELEAILHQQAKYYPFLKENYDKIKSLVTFRIPYFVGPLANGQSEFAWLTRKADGEIRPWNIEEKVDFGKSAVDFIEKMTNKDTYLPKENVLPKHSLCYQKYLVYNELTKVRYINDQGKTSYFSGQEKEQIFNDLFKQKRKVKKKDLELFLRNMSHVESPTIEGLEDSFNSSYSTYHDLLKVGIKQEILDNPVNTEMLENIVKILTVFEDKRMIKEQLQQFSDVLDGVVLKKLERRHYTGWGRLSAKLLMGIRDKQSHLTILDYLMNDDGLNRNLMQLINDSNLSFKSIIEKEQVTTADKDIQSIVADLAGSPAIKKGILQSLKIVDELVSVMGYPPQTIVVEMARENQTTGKGKNNSRPRYKSLEKAIKEFGSQILKEHPTDNQELRNNRLYLYYLQNGKDMYTGQDLDIHNLSNYDIDHIVPQSFITDNSIDNLVLTSSAGNREKGDDVPPLEIVRKRKVFWEKLYQGNLMSKRKFDYLTKAERGGLTEADKARFIHRQLVETRQITKNVANILHQRFNYEKDDHGNTMKQVRIVTLKSALVSQFRKQFQLYKVRDVNDYHHAHDAYLNGVVANTLLKVYPQLEPEFVYGDYHQFDWFKANKATAKKQFYTNIMLFFAQKD

SEQ ID NO: 1580 - protein, 187 aa, Pseudomonas aeruginosa
MDHYLDIRLRPDPEFPPAQLMSVLFGKLHQALVAQGGDRIGVSFPDLDESRSRLGERLRIHASADDLRALLARPWLEGLRDHLQFGEPAVVPHPTPYRQVSRVQVKSNPERLRRRLMRRHDLSEEEARKRIPDTVARALDLPFVTLRSQSTGQHFRLFIRHGPLQVTAEEGGFTCYGLSKGGFVPWF

SEQ ID NO: 1581 - protein, 187 aa, Pseudomonas aeruginosa
MDHYLDIRLRPDPEFPPAQLMSVLFGKLHQALVAQGGDRIGVSFPDLDESRSRLGERLRIHASADDLRALLARPWLEGLRDHLQFGEPAVVPHPTPYRQVSRVQAKSNPERLRRRLMRRHDLSEEEARKRIPDTVARTLDLPFVTLRSQSTGQHFRLFIRHGPLQATAEEGGFTCYGLSKGGFVPWF

SEQ ID NO: 1582 - protein, 187 aa, Pseudomonas aeruginosa
MDHYLDIRLRPDPEFPPAQLMSVLFGKLHQALVAQGGDRIGVSFPDLDESRSRLGERLRIHASADDLHALLARPWLEGLRDHLQFGEAAVVPHPTPYRQVSRVQAKSNPERLRRRLMRRHDLSEEEARKRIPDTVARTLDLPFVTLRSQSTGQHFRLFIRHGPLQATAEEGGFTCYGLSKGGFVPWF

SEQ ID NO: 1583 - protein, 187 aa, synthetic construct
  REGION 1..187: note = Description of Artificial Sequence: Synthetic polypeptide
MDHYLDIRLRPDPEFPPAQLMSVLFGKLAQALVAQGGDRIGVSFPDLDESRSRLGERLRIHASADDLRALLARPWLEGLRDHLQFGEPAVVPHPTPYRQVSRVQVKSNPERLRRRLMRRHDLSEEEARKRIPDTVARALDLPFVTLRSQSTGQHFRLFIRHGPLQATAEEGGFTCYGLSKGGFVPWF

SEQ ID NO: 1584 - protein, 187 aa, synthetic construct
  REGION 1..187: note = Description of Artificial Sequence: Synthetic polypeptide
MDHYLDIRLRPDPEFPPAQLMSVLFGKLAQALVAQGGDRIGVSFPDLDECRSRLGERLRIHASADDLRALLARPWLEGLRDHLQFGEPAVVPHPTPYRQVSRVQVKSNPERLRRRLMRRHDLSEEEARKRIPDTVARALDLPFVTLRSQSTGQHFRLFIRHGPLQATAEEGGFTCYGLSKGGFVPWF

SEQ ID NO: 1585 - protein, 239 aa, Thermus thermophilus
MVLAALVLVLEGEGLPEPLGLRGFFYGLLREVAPEVHDQGENPFALGFGGREGAAWARVSLLVEGLYARLAPRLYALEGEEVRLGPPFRVRAVLQEGHPWAGVSTYPRLFQGPPSRDLALRFASPTFFRRKGVHYPVPEPRLVLESLLRRLEAFGPLKAPEGVREALLERTTVRSLEGRTLPARTEVDTAGFVGRVVYHLPRATEEEALWLSALGRFAFYSGVGAKTSLGYGRARAESA

SEQ ID NO: 1586 - protein, 264 aa, Thermus thermophilus
MPQAVVLELVGEKPPLYPARYAHGLFFALLSRVSPELAQKLHEAPRKPFTLAPLPRAGPEGATLKGTLRLRLTTLDDGLFAPFLRALLEAAPDGLPLGDSSYRLARVLATREGHPLAGATSWEELKEAPKREKATFRFLTPTVFATSKPGGRTRYTPLPDPRLIAGSLLDKWQAHSPFPYNPKEEAALRELFELDLEVAGFRNLRFHRVQAGKGFFPGFTGEATLRLWSQSLEAQEALGRLHALAFFSGVGAKTPYGMGLAVPL

SEQ ID NO: 1587 - protein, 244 aa, Staphylococcus epidermidis
MINKITVELDLPESIRFQYLGSVLHGVLMDYLSDDIADQLHHEFAYSPLKQRIYHKNKKIIWEIVCMSDNLFKEVVKLFSSKNSLLLKYYQTNIDIQSFQIEKINVQNMMNQLLQVEDLSRYVRLNIQTPMSFKYQNSYMIFPDVKRFFRSIMIQFDAFFEEYRMYDKETLNFLEKNVNIVDYKLKSTRFNLEKVKIPSFTGEIVFKIKGPLPFLQLTHFLLKFGEFSGSGIKTSLGMGKYSII

SEQ ID NO: 1588 - protein, 314 aa, Mycobacterium tuberculosis
MAARRGGIRRTDLLRRSGQPRGRHRASAAESGLTWISPTLILVGFSHRGDRRMTEHLSRLTLTLEVDAPLERARVATLGPHLHGVLMESIPADYVQTLHTVPVNPYSQYALARSTTSLEWKISTLTNEARQQIVGPINDAAFAGFRLRASGIATQVTSRSLEQNPLSQFARIFYARPETRKFRVEFLTPTAFKQSGEYVFWPDPRLVFQSLAQKYGAIVDGEEPDPGLIAEFGQSVRLSAFRVASAPFAVGAARVPGFTGSATFTVRGVDTFASYIAALLWFGEFSGCGIKASMGMGAIRVQPLAPREKCVPKP

SEQ ID NO: 1589 - protein, 243 aa, Streptococcus thermophilus
MKKLVFTFKRIDHPAQDLAVKFHGFLMEQLDSDYVDYLHQQQTNPYATKVIQGKENTQWVVHLLTDDIEDKVFMTLLQIKEVSLNDLPKLSVEKVEIQELGADKLLEIFNSEENQTYFSIIFETPTGFKSQGSYVIFPSMRLIFQSLMQKYGRLVENQPEIEEDTLDYLSEHSTITNYRLETSYFRVHRQRIPAFRGKLTFKVQGAQTLKAYVKMLLTFGEYSGLGMKTSLGMGGIKLEERKD

SEQ ID NO: 1590 - protein, 244 aa, Streptococcus sanguinis
MKKIRLHLSKVSLKDDDLVCKLQGFLMEKLSDDFASFLHQQETNPYSMNLRSEREESIWTVNLLSEEAEQQILPQLLSLEMIKLETYSEEILVKNIEIQSLSSQSLLEVFQGDEASHLISLNFYTPTTFKRQGQFVLFPDTRLIFQSLMQKYSRLVEGKAEIEEETLEFLAEHSQISSYRLKSHYFPIHGRKYPAFEGRVTIRIQGASTLKAYAQMLLRFGEYSGVGAKCSLGMGGMRIEERKT

SEQ ID NO: 1591 - protein, 277 aa, Microcystis aeruginosa
MPYSLVLNLTPRSPIYPNFLTGRHLHALFLTLVSSVDQELGKILHTAEADKAFTLSPLQMQSGGKTINSPQWRYERPIAPETPCWWRISLLDDRLFGKLTPLWLNLNPKHPWHLGSADLVITSVLATPQSVQPWANSCTYQYLYENASETNREFDFLFATPVTFRQGKFDSALPTRELVFNSLLNRWNRYSAIPFDSIVLESIFPSFFDIQTKLADEAYKNQSFGCVGEIHYRLLGEVEPAKIKAINVLADFALYAGVGRKTTMGMGMTRRIAKEKR

SEQ ID NO: 1592 - protein, 267 aa, Meiothermus silvanus
MMLAALVLPLEGQARPDPDGWRGLVYGLLKEIDPELHTAQHNPFSLGLGGAEGQWWVRIALLEEGLYARLSPHLFGLVGQSVKLKEPFRVRAVLQEEHPWASLSTYPRLFQGQASPSLGLQFASPTFFRRKGNSYPLPEPKLVFDSLTQRWNAFAPVKVPPEMAETWERVTITRLQGHTQAIRPNPDERGVGFVGRVVYHLPAAKPTEAQWMQALGRFAFYAGVGAKTSLGFGRVRGFDPILKEESANGRLDAEDSSSLATPQDPGA

SEQ ID NO: 1593 - protein, 267 aa, Meiothermus silvanus; identical to SEQ ID NO: 1592

SEQ ID NO: 1594 - protein, 262 aa, Meiothermus ruber
MILAALILPLEGPTRPDPDGWRGLVYGLLKEIDPELHAAQHNPFSLGLGGALGQWWVRIAFLEEGLYARLSPHLFGLAGQTVRLKEAFQVRAVLQEAHPWAGVSTYPKLFQGQATASLGLQFASPTFFRRKGHSYPLPEPRLVFESLTQRWNAFAPVKVPQEVQEAWERLLVGQFQGRTHHIAPNQDERGVGFVGRVVYYLPKASPTEAQWLQALGRFAFYAGVGAKTSLGFGRVRMFDPLQQERRPDESEQGALTGTVGGV

SEQ ID NO: 1595 - protein, 239 aa, Thermus thermophilus; identical to SEQ ID NO: 1585

SEQ ID NO: 1596 - protein, 239 aa, Thermus thermophilus
MVLAALVLVLEGEGLPEPLGLRGFFYGLLREVAPEVHDQGENPFALGFGGREGASWARVSLLREELYARLAPRLYALEGEEVRLGPPFRVRAVLQEGHPWAGVSTYPRLFQGPPSRDLALRFASPTFFRRKGVHYPVPEPRLVLESLLRRLEAFGPLKAPEGVREALLERTTVRSLEGRTLPARTEVDTAGFVGRVVYHLPRATEEEALWLSALGRFAFYSGVGAKTSLGYGRARAESP

SEQ ID NO: 1597 - protein, 236 aa, Thermus sp.
MLAALVLTLEGEAPPEPRGLRGFFYGLLQEVAPEVHDQGENPFALGFGGKEGAYWARFSLLQEGLYARLAPRLFALEGKEVRLGKPFRVRGVLQEGHPWAGVSTYARLFQGEALPDLPLRFASPTFFRRKGVHYPLPEPRLVVESLLRRLEAFGPLKAPEGVREALLERTTVRWFEGKTLKAETEVEAVGFVGKVVYHLPRATEEEARWLQALGRFAFYSGVGAKTGLGYGRARVG

SEQ ID NO: 1598 - protein, 247 aa, Thermus aquaticus
MVLVALVLVLEGEGPPEPLGLRGFFYTLLKEAFPELHDQGENPFALGFGLRGGEPWARVSLLREDLYGRLSPALFGLEGREVRLGRLFRVRAVLQEGHPWAGLTTYARLFQGPHSPNLPLRFYSPTFFRRKGVQYPLPEPRLVLESLLRRLEAFGPLKAPQEVREALLERTTVRFLEGRTQMARTEVDTVGFVGKVVYHLPKATEEEALWLSALGRYAFFSGVGAKTSLGYGLARAFTQVGPQDAET

SEQ ID NO: 1599 - protein, 251 aa, Marinithermus hydrothermalis
MLLAALVLPLEGPDRPQPLHARGWVYRLLREAAPEIHDAEGPKPFTVGVGGRPNAVWVRLTCLAEEVYAALSPRLWSQVGLEVRLGEDTYRIKAVLEAEHPWAGLATWPRLFQGEAGPDLGLEFASPTFFRRQGANYPLPEPRLVLGSLIERWNAHAPTPVPPEVAERLVEATTLRYLKGHTVSAVGHDRTVGFRGRVTYHLPRASTEEARWLAALGRFAFFSGVGAKTTLGFGQVRPYPLLAPSAAPPGP

SEQ ID NO: 1600 - protein, 264 aa, Thermus thermophilus; identical to SEQ ID NO: 1586

SEQ ID NO: 1601 - protein, 264 aa, Thermus thermophilus
MPQAVVLELVGEKPPLYPARYAHGLFFALLSRVSPELAQKLHEAPRKPFTLAPLPRAGPEGATLKGTLRLRLTTLDDGLFAPFLRALLEAAPDGLPLGDSSYRLARVLATREGHPLAGATSWEELKEAPKREKVTFRFLTPTVFATSKPGGRTRYTPLPDPRLIAGSLLDKWQAHSPFPYNPKEEAALRGLFELDLEVAGFRNLRFHRVQAGKGFFPGFTGEMTLRLWSQSLEAREALGRLHALAFFSGVGAKTPYGMGLAVPL

SEQ ID NO: 1602 - protein, 264 aa, Thermus thermophilus
MPQAVVLELVGEKPPLYPGRYAHGLFFALLSRVSPELAQKLHEAPRKPFTLAPLPRVGPEGATLKGILRLRLTALDDGLFAPFLRALLEAAPDGLPLGDSSYRLARVLATREGHPLAGATSWEELKEAPKREKATFRFLTPTVFATSKPGGRTRYTPLPDPRLIAGSLLDKWQAHSPFPYNPKEEAALRELFELDLEVAGFRNLRFHRVQAGKGFFPGFTGEATLRLWSQSLEAQEALGRLHALAFFSGVGAKTPYGMGLAVPL

SEQ ID NO: 1603 - protein, 264 aa, Thermus thermophilus
MPQAVVLELVGEESPLYPARYAHGLFFALLSRVSPELAQKLHEAPRKPFTLAPLPRVGSEGATLKGILRLRLTILDDGLFAPFLRALLEAAPDGLPLGDSSYRLARVLATREGHPLAGATSWEELKEAPKREKATFRFLTPTVFATSKPGGRTRYTPLPDPRLIAGSLLDKWQAHSPFPYNPKEEAALRELFELDLEVAGFRNLRFHRVQAGKSFFPGFTGEMTLRLWSQSLEAQGALGRLHALAFFSGVGAKTPYGMGLAVPL

SEQ ID NO: 1604 - protein, 227 aa, Desulfovibrio vulgaris
  REGION 1..227: note = str. Hildenborough
MTHGAVKTYGIRLRVWGDYACFTRPEMKVERVSYDVMPPSAARGILEAIHWKPAIRWIVDRIHVLRPIVFDNVRRNEVSSKIPKPNPATAMRDRKPLYFLVDDGSNRQQRAATLLRNVDYVIEAHFELTDKAGAEDNAGKHLDIFRRRARAGQSFQQPCLGCREFPASFELLEGDVPLSCYAGEKRDLGYMLLDIDFERDMTPLFFKAVMEDGVITPPSRTSPEVRA

SEQ ID NO: 1605 - protein, 224 aa, Neisseria mucosa
MNQIRLHVWGDYACFTRPEMKVERVSYDVITPSAARGILAAVHWKPAIRWVIDRIYVLKPIRFESVRRNELGGKISAGKVSGAMKRKSVADLYTLIEDDRQQRAATVLKDVAYVIEAHAVLTAKAGADETVTKHIEMFKRRAKKGQCFQQPCLGVREFPADFALIDEGEPLPPSALSESEANRDLGWMLHDIDFDHGNTPHFFRAQMKDGVIDVPPFYAEEVKA

SEQ ID NO: 1606 - protein, 236 aa, Bacillus halodurans
MRNEVQFELFGDYALFTDPLTKIGGEKLSYSVPTYQALKGIAESIYWKPTIVFVIDELRVMKPIQMESKGVRPIEYGGGNTLAHYTYLKDVHYQVKAHFEFNLHRPDLAFDRNEGKHYSILQRSLKAGGRRDIFLGARECQGYVAPCEFGSGDGFYDGQGKYHLGTMVHGFNYPDETGQHQLDVRLWSAVMENGYIQFPRPEDCPIVRPVKEMEPKIFNPDNVQSAEQLLHDLGGE

SEQ ID NO: 1607 - protein, 246 aa, Bacillus cereus
MKKEEESLRNSIEFEVFGDYALFTDPLMKMGGEKLTYQVPTYQAIKGIVESIYWKPTLLMIVDKIRIMNAIKMESKGIRPIEYGGGNTLANYTYLKNVRYQVQAHFIFNPHRPDLAFDRNEYKHHNILKRSLKVGGRRDIFLGTRECQGYVEPCVFGEGEGFYDNYGGDIHLGTMVHGLNYPDETGRNELEVRLWNPVMRDGIIQFIRPEECTKIRKISKMEPKIFDSSNVESVDELIKQLEEGGE

SEQ ID NO: 1608 - protein, 239 aa, Selenomonas noxia
MRNSIEFQVYGRMALFTDPITKIGGEKASYSVPTYQALKGITESIYWKPTIIWFIDEVRVMKRITTQVRGVKPLKYGDSGNDLSYYKYLSDVCYQVRAHFEFNMHREELKEDRDEHKHHNIAKRMVERGGRRDIFLGTRECQGYVEPVKYGVGKGYYDNVDELPLGIMLHGFNYPDETGEDKLQVRFWKPTMKKGIIHFRRPEKCEMVRDIREVRTKQFDADNVFFAEEEEKQLEGGHL

SEQ ID NO: 1609 - protein, 4 aa, unidentified
  REGION 1..4: note = Description of Unknown: 'DEAD' motif sequence
DEAD

SEQ ID NO: 1610 - protein, 4 aa, unidentified
  REGION 1..4: note = Description of Unknown: 'DEAH' motif sequence
DEAH

SEQ ID NO: 1611 - skipped

SEQ ID NO: 1612 - RNA, 36 nt, synthetic construct; identical to SEQ ID NO: 569
  source 1..36: mol_type = other RNA

SEQ ID NO: 1613 - RNA, 38 nt, synthetic construct
  source 1..38: mol_type = other RNA
ttgttggaaccattcaaaacagcatagcaagttaaaat
